United States Patent Application Publication US 2026/0191916 A1 - sequence listing, part 20

SEQ ID NO: 40 - DNA, 7086107 bp, Bacteroides cellulosilyticus (residues 1-1,771,527 of 7,086,107)
  source 1..7086107: mol_type = genomic DNA
atgagtgaattaaatcatgtcgggctatggaaccgctgtcttgaaatcatcagagacaatgttccggagcagacatacaaaacatggtttctccccatcatacctttaaaatatgaggacaagacgctggtcgtacaggtacccagccagttcttctatgagtttttggaggacaagtttgttgacttgttgcgtaaaactctatataaagttattggtgatggcaccaagttattgtataatgttatggtggataagagttcacgtactaccgtcaatctcgaatctactccccgcactattattccacaaaaaaaggtaatcggcagagaaataccgcaagctcctattgcagatttagatccgcatctgaatcctgaatacaacttcgaaacatttatagaaggctatagcaacaaactttcacgcagcgtagcagaagctgtcgctcaaaacccggcgaaaacaattttcaatccgctgtttttctatggagcatcgggcgtgggaaagacgcaccttgcaaatgctataggcacaaaaatcaaagaactctatccggacaagagagtgctatatgtatcggcacatctgttccaggtacaatataccgactctgtacgtaacaatactacaaacgattttatcaacttctaccaatcaattgacatattgattatcgatgatattcaagaatttgccggtgttaccaaaacacagaatacattctttcatatctttaatcacttacatcaaaacggtaaacagcttatcctgacttcagaccgtgctcccgtattattgcaaggcatggaagaacgactcatcacccgtttcaaatggggtatggtagctgaactggaaagaccaaccgtagaattacgtaagaacattctgcgcaataagatacatcgtgacggtttacagttccctccggaagtaatcgattatattgcagaaaatgtgggtgacagcgtgcgtgacctggaaggtatcgtcatctccatcatggcacattctactatatataataaggaaattgatctggaactgacgcaacgcattgtacggaaggtagtaagaagtgaaagtaaatctattaccgttgatgacatcatcaacgtggtatgcaagcatttctcactggacaccgctaccatccatactaaatcacgaaaacgcgaagtggtacaggcacgccagatagccatgtttctcgctaaatcctatacagatttttcgacggctaagataggcgcattaataggccacaaagatcacgcaaccgtattgcacgcctgcaaaaccattaaagaattacgggaagtagacaaaactttccgcgcagaaatagatgatatccaagcatcattaaaaaagcagggttaaaaaccctgcttttttattactttccaaagattctccgacattacttcgttatcttctttcttataacgtacgtccgtaaagacttgagccaaggtttctttgttgttttcaaaaataaattgcttattttcgggcaaagattccttataggcatacaggcgatctatatcttcaggagtataatcatgatacgtctcctcatgcacaatagcttccagcggcaatcgatctacctgtgcaggctcctcggcaggccaacctaccgtcactgttgtaataggaaataccaattccggtagctccagggcttcgattatcatttgcggattgtaagtcgtcgtacccagataacatatacctaatcctttttcttccgcagccacacaaaaagtctgtgctgccagcagggcatctacagagccggttacgaaccactctaaattattatacccgggagttgcttttcgctgttcgcaccatttagtaaaacggcgcaggtctatacaaaacgtcaaaaccacaggtgcagttttcaccatcggctgattgaaatgagccggtgccaacctagccttccgttctgcatcacgcgttacaattacactgtacacctgcatatttccgactgtagaggctcgaaatgcagaatcaagcaaatcatttaacaaatctgaagaaatatctttctgttgatatttgcggattgttcttctctgttttaggatttccattcttttatttttttgcaaatatagaaaaagaatagcaatttgttgtcaaataacgagtttaaagtttatctacgttttctaaaatcaattagcctgtttaatcaaagtctaaaaacaattttcttttttggaaactttttgttcacacaacaatgctaatattttataaatcagcaaactattattcagaaatggaaatctcacagcctgttcataatttattctgtttttattttgctataataaaaaacattcttagctttgcaatcgcatttgttaatgataggtatcacttctacactcttacttattaaaaaataaatctaaggaaaaaagaatcgtggaaaaacaaacttattcttacgaggaagcttatgaagaatctttacgatattttcagggcgacgagttagctgcgcgtgtttgggtaaacaagtacgcagtaaaagactctttcggaaatatttacgagaagtctccgaaagacatgcattggagaatagccaatgaagtagcccgtatcgaggctaaatactctaatccattaagtgcagaggaactattcgatctgctcgaccacttcaagtacatcgttccgcagggaagcccgatgaccggaattggtaacaactatcaggtagcttctttgtctaactgcttcgtgatcggagtagatggagaggcggattcttatggtgccatcttcaaaatagacgaagaacaagtacaactcatgaagcgccgtggtggtgtaggacacgatttgtcgcacatccgcccgaaaggttctccagtgaaaaattcggctttaacctccaccggcctggtgccatttatggagcgttactccaattctacacgtgaagttgctcaggacggacggcgtggcgcactaatgctaagtgtatctatcaaacatcccgattcagaagcgttcatcgatgctaaaatgacggaaggcaaagtaacaggtgccaatgtatctgtgaaactggacgatgcatttatgaccgctgctatcacaggtactccatatattcaacaatatcctgtcaatgccgctgaaccaactgtgcagaaggaaatcaatgcaaccaatttgtggaagaagatcgttcacaatgcatggaaatcggcagaaccgggtgtattgttctgggataccataataaaagaatccgtacccgattgctatgcagatttgggatatcgcacagtttccaccaatccatgcggtgaaatccctttgtgcccgtatgattcctgccgtttgctggctatcaatctttattcttatgtagtaaatcctttcaaaccggatgcatactttgactttgaattgttccagaaacatgtagcgttggctcaacgcattatggacgatatcatcgatctggaattggagaagatagaacgcatcatggaaaagattgatgctgaccccgaaagcgaagatgtgagacatacagaacgtgtattgtgggacaagatttataagaagagcggacaaggacgccgtaccggtgtaggtattactgccgaaggtgatatgcttgctgcactgggattgcgttacggtacggaagaagctactgaattctctgaaaaagtacacaagaccgttgccctgagtgcttaccgttcatcggtagaaatggcaaaagaacgtggcgcattcgaaatttacgataccgaacgtgaaaagaataatccgttcatcaatcgtttgcgcgaagcagatccccagttgtatgaggatatgaagaaatacggccgccgcaatattgcctgccttaccattgcaccgacgggaaccaccagtctgatgactcagactacctcaggtatcgagcctgtattcttgcccgtatacaaacgtcgccgtaaagtaaatccgaacgacactaacgtgcacgtagacttcgtggatgaaaccggagatgcttttgaagaatatattgtcttccaccccaagtttgttacatggatggaagcgcaaggacacaatccttccaaacgttacacacaagaagagatcgacgtattggttgagcaatcaccttattataaagcaacctcaaacgacgtagactggctgatgaaagtcaagatgcagggacgtatccagaaatgggtagaccactccatcagcgtgaccatcaacctgccgaacgatgtggatgaagacctggtaaaccgcctgtatgtagaggcatggaaatccggttgtaaaggttgtacggtttatcgtgacggctcacgttcgggcgtacttatttctgccaagagcgataagaaagaagaaatgcctccttgcaaaccgcctacggtagtagaaacccgcccgacagttctggatgccgacatcgtacgtttccagaataataaagaaaagtgggtggcattcgtcggtttgctggacggacatccttacgaaatcttcaccggtcttcaggacgacgatgaaggcattattctgccgaagaacgttacttccggacacattattaagaaggtggacaaggacggcagcaagcgttacgacttccagttccagaacaaacgcggatataaagtcaccattgaaggtctgtccgaaaagttcaacaaggaatactggaactacgccaaactgatctccggagtattgcgttatcgtatgcctatcgaacaggttatcaagctggtcggctctctgcaactggacagcgaaagcatcaatacctggaagaacggtgtggaacgcgcattgaagaaatacataacggacggcacagaagccaaaggcaagaaatgtccgaactgcggcaacgaaacacttgtatatcaggaaggttgcctcatttgtaccacttgcggagcttcacgttgcggataaaaacagatctgcgaaatgcaagcacaaacgtttgcataggaatttaaaaaacttagatagcggtagctgcttgattatgcggaataatgtctatacttgcataatcaatgcagctattactaaatctaatattatatgatactatcttttcatatcgagtaccgcacaagttggggtgaagaggttagagtcttaggatctattcttgaactgggcaacaatcagcccggtaaagccatacctttacaaacagtggatggcattcactggactttagatgcggacattcaagcgcctaaaaacggcatcgtacaatacagttatcacatttatcgcgacggcaaagatacacgtacggagtggaacagccttccccgtacgctctatgtatcggctgacaagaagaaagtctaccgcctgcaagactgctggaagaatctgcccgaacagcaatacttctacacgtctgctttcacggagtccctgcttgcacatcccgaacgtaacaccgctccaaagagccacaagaaaggattattgatcaaggcgtatgctccatgcatcgacaatgatcactgtctgggcatttgcggcaaccagaaagttctgggagattgggatgcggataaagccgttctgatgagcgacgccaacttcccggaatggcaggttgaagtagacgcctcgaaaatcagcttcccgctggagtataaattcatcctttataataagaaagagcgtcgtgccgtggcatgggaaaacaaccccaaccgctacatggccgatccgcagataggcgctaacgaaacactggtgatcggtgaccgttacgtttacttcgccctacccgactggaaaggtgccggagtagccgtgcccatcttctcgctgcgctccgaaaagagcttcggcgtaggtgactttggcgacctgaaacagatgatagactgggcggtgcttacccgccagaaagccgtacaaatattgcctatcaacgacaccaccatgacacatacatggacggattcttatccgtacaacagcatatccatttatgcgttccaccccatgtatgccgatctgaaacagatgggtacgttgaaggacaaaaaggcaatggcagaattcaataaacggcagaaagagctgaatgctttgcctaccgtagactatgaagcagtaaatcagacaaaatgggagttcttccgcctgatatacaaacaggaaggcgaacaagttctggcatccgatgccttccggaagttcttcgaaaacaacaaagaatggttacagccatacgccgtgttcagctatctgcgcgatgcctacaagacacccaacttccgcgaatggccgaaattcacagaatacaaagcagaagaaatagaaaagttatgccagccggaatctgccgactatccgcatatcgccatctacttcttcatccagttccacctgcacctgcaactgctggctgcaacggaacacgcacgagccaatggtgtagtactgaaaggtgacattcctatcggcatcagccgcaacagcgtagaagcgtggacagaaccctactacttcaacctgaacggacaagcaggcgcaccacccgatgacttctccgtgaacggtcagaactggggcttccctacttacaactgggacgtaatggagaaagacggttattcctggtggatgaagcgtttccgcaagatgtcggaatacttcgatgcctaccgtatcgaccacatcctgggtttcttccgcatttgggaaatcccgatgcatgccgtacacggactgctgggtcaatttgttcccgccctgccgatgacgcgcgaagaaatagaaggctacggaatggcattccgcgaagatttcttcacgaaaccctatatccatgaatacttcctcggacaaatgttcggcccgcatactgattatgtaaagcagaccttcatagagcctacggaaacatgggaaatatatcgcatgcgtcccgagttcgacacacagcgcaaagtagaggcttactttgccggaaagacggacgaagacagcatctggatacgcgacggcctgtacgcattaatcagtgacgtactgtttgtgcccgaccgtgaagacccgcacaaattccatccgcgcatcggcgtacaacacgattacatctaccgtgctctgaatgattgggagaaggcggcattcaatcgtttgtacgatcagtattactatcatcgccacaacgagttctggcgcgaacaagccatgaagaagttgccgcaactgacgcaatccacccgtatgctggtatgtggtgaagacctcggtatgatccccgattgtgtagcttgggtgatgaacgacctgcgcatccttagcctggagatacaacgcatgccgaaagatccttcacaggaattcggacatccggactggtatccgtaccgctcggtttgcaccatctctacgcatgatatgtctacgctgcgcggctggtgggaagaagatttccagcaaacgcaacggtactacaacaccatgctgggacattacggcgctgcacctgccgttgccactccggaactttgcgagcaagtggtacgcaaccatctttacagcaactccatcctgtgcatcctctccttgcaggactggatggctatggacggaaaatggcgcaaccccaatgtacaggaagagcgcatcaacgtgcctgctaaccccagacattactggcgctaccgtatgcacctgacgctggaacaactgatgaaagcggaaagtctgaacgagaagatcaaaggactgatagaacaaaccggacgaaaaggataatactctcaatctttataatagaaaaaggcacccatagtaggtgccttttttattcataaccagtatactggagtttcccacccttagggaacgactgtttcctcaagagggaactgcagttcccccgcagggaacaggaatctccctcaaggagacgggaaacgcctactttccttctcccatcttatccagtaaaaacagaatctccgcctgcttgtcaaagcctgcctgcttatattcatcgtaagtcagcatcacatccggccagaaagtctttgcacgcttatcctttcccggcagaaatacctgcatagaattagagattgaaccttctattccggtatggggcaatttgaaaagtgtctgttccatgaaagtattcggagcctgcccgcttggcacgcccaccaccgtagctcccatcttccacaacatgaaagaataatgaaacgcagcgctgaacgtacgctcatccgttactacaaagacctgcttcggggtatataccggagcacctttctgcgcacgcaattcttctttcacactactcatgcaatcatcaataaactgtcgtcgcagggtatcaagcggtacatcctcctgttcttccatgctgaatgtatagtcaccaaagttataatcggttccataacgcttattgaactcttccagagttacctctaacttattcatatacaacggcgaaacaatccgataatactccgtatccatatcctcctgcaagtatttgtccccataaagctggtacaaagtagccagtacgataggcgtccaaccgccgctgtttccccgaagatcaataatcagatattccgagcgattcttcttcatctctttcagcatagtggcaaaggttcccgaaaacgaaggcaatgcatggatagcctgcaaagtatccgcaggcatctctttcctcaaagtattctgatagtaaaactccatctggcggaacagatcccctttcatatacttgtacatatactcaaaattatcacgcgccataatgctgttcaccttaaacatcatcacttctttcttcttgtctatgaagcgataagccatttgctcctcagggcatccctcccaggatggaagactcgctttctctgctttcctcaagtcctcattatccataaagtgctgttccaaagtcatttcctttccatccggagtgcgcaaattgaggcaaaccgtatcttccaaatcaggcaacaactgttgcataaactgctttctcgccacgttccggcaaaatacggaataacggttatagagattctcacatgcaaagagacttgccgtccgcaccagtaattcgtccatactcttaccattgattccagtaagaagactacccagcaagtcttgatgtgcagccggaagactttgtacaatcaacccgtcagggatacacctgaaccctacaggcaagtagctctgttcctgtcgctgcttaggcgcaagagaaaaaagatacgtatgcccgtcctgaatgaaagacaaaaatgccatcgacttatcccaaaattcctggagggtatggggtttactacgtaactcgttttctaaatcaaacgcttgcttatgaaaaaatactttgcctccgaagccagtgtacggatcaggatgcgtagcttcaagttgtttcaccagataatgaaaatcagcggcaagcgaatccccgcttaccttactctgcgcagaaagagagaggcagaccaatgcggataaaagaaagaaatagaagtgtttcatgtctcatttttttagttgttggtacaaatatacctgttttctttgtttactgggcagttattcttatttttgtcattaacctaatattccattgatatgaacagttatatattccttgataacgtccgtttctttgcctaccacggtgtaggtcagcaagagcgggaagtaggtaatgagtttgtcattaatctgaaattgaaagtcgatattgcacgtgcagccgagactgacgacgtgacacataccgtcagttatgccgatgtatacgaaaatgtgaaggctgagatggagataccttctaaattgctggagcatgtttgcggacgtatcataaaacgcctgttccgtactttccccaccgttaaagctattgagctaaaactcgctaaacgtaatccacccatgggtgcagacttagatgcggcaggagtggaagtgcaatgtgaaagagcttaacccactcccactgtttttttattaaagtgaactcagtaagcaataaaaggaaatctcacacagttgagttttcatcaatattgtctacatcctacaccggctattatgtttatctgattatcagataaataggcagtgtaggaagtggtgtaggaaggtgtaggaaagttttattctacaccgtaaaacggctcaaaaagcgtgcttttaatcttgtaattcactaattcacaagcgcttaatatacgttatgcaacctttatccgaattgatgcaaatatctcttttattcgtcgcacgagtgaataaagttagcatttcgttaggaattaagggatgataagccccatactcccattacgtagaaagtcaaatgatagatataaaacttgatatactccttactttttcccaaaaagcattcaggttaatgtcattatgcccgcagctaaacttcgtcccgcagttgtgggctgtccatcccgcaattgcaggctgcacagccctcaactggaaaacgtagagcccacaactgcgggacgaagtttagctacaggcaaaagaaaaaaacaataaagcaaagcatgtttttcatacggctttcttcccatctttctgattgtttccaagcgttctgttgtggcatgtagatagctaaaacagcttataaatgacacttcaatagctgccaccgttaagattatcctattctatccttaaaccttatcctcttaaaaaaaagtgtcttagcctgtatcgccctgccgatgggaaatacagaaagaaaagcgaaacgaatgaatatttaaaaacgatttcaacagtcgttttacaaataattatttatacctttgccgtcgacaaaacaaacaagctataactaaaatgaaaataacatcagcattgcttagcttatcattgctactcttttcctgttcacacaacaatgagacagaagccttattcttaaaagcagattcactaatggatgaatatcctgacagcgtactccaattattgaacattcagccggaagaaatagaagatttttcagacaaagaatgcgcacgctatgcactgcttcttgcacgtgccacggataagtgcaagctctccctattaccttgtgactcgctgctaaacgtggcattagagtattatgacgatgatgaaaaagaaaaagcaatagcactactttataaaggaaggctggcggtggaaatggaagaggaaaaagaagccatttcatatcttcaaaaaggattgatcatcatacaaaactttccaaaagaacttaaaaccaaaagtttgttcctcagctcgttagggaatctctactttgacgccgggtattatgacgaatccatagaaatatacgaagctatgtatcaatgttctatcacagacctggataaatcaatagccctcaacagtatcagtacatattattgcttaatagatgaaaaagactccacactcatgttccagcgtaaagcactacattatgctatcgcttcgggagattctctacagattgcaatgtctaagcacaatttaagtctggaatttgatagttttgatgagcttgattccgccttatattatgcacaaaatgcccttaaaagactgcctcaaaaggagaaccatggaaattattatagtaatctaggatatttaattttgaagacaggaggaaataaagactcagcgcgctattatatgaataaaagcttagaagagctatcgattgaaggtaagtctactactttaaagaatttatatgatcttgaaaaagaaaacggagattataaaacagcaaatatttatttagaagaacatgccgccatcatagattctctatattgcatggaacagtcaaccgaaatacaacaactgatttatgaatacaatactaaaatgagggtaagagaggaacaattaaaaggaaaacgcatcatatattgtaccattgcaggctttgtttcgatttgctttctaatcatacttggctatcaaaactatataaaccgaaagaaacgtgtccaacttcaatacaaacaatcattagaacaaacacaaaataaattatcttctctacaaggtacaattgaaaataatcaattaataattgacttattacaccaagagcagagtaacttaaagaaagaacaagaaaatattaaaaggcaaatagaagaaagagaacaaagcatagctaacttaaagaaagaaaagcaacgactacttaactggttattggagcaaagcaatatttataagagagtgattactctttcgaaacaagctgtttcgaataaaaaagcaatgaaagtgttgaccacagctgagcaagatcaattaaaaaagaccatatttgaaatataccatgattacatatctttccttcaaaaaaaatattccaaattgacagaaagtgatttattatacctctgtttgcaggaaacctctcttgattcgcaatccatcgctatttgctttggttatagcgacacgcatcctctcagtcagaaaaaatatagaataaaagagagaatgattgaagaagaaagcaagatgtgattgcctctttcgctatccacctatttaccaacacattacatttctatagtgtgattacaaaaatgcattcatcctaattgtttgccctaactttgcaaccgtaaacaattaattaaatatagaaatgaaaacaaaagtattatttattctattatcggtattattcattatgccaatgaatgcaatgccatacaaaaggcatcagcacaaagtaaagacccgaattattcattcaaatataaaagtaaccactcgcagccccttattttttgacctgaccgccgatgaaatagacagtaacttaattattactttccaatcgtttttagatgaagcagacattactgtgattgataaaaatggagtaactgttgctttcgaatcaaaagcctccattcatgaaggaaagacagtaaatattcctgctccagaagctgatttctacacaataaaaataacctcacccaccatagacgtaacgggagaaatcacacttgaagaaatataaattatcaatgctatttaattaataggcatctactaaagaacagaatattatttatatacattaaccgattaaataactaaaaatgaaaattaaaagtattatttctattgcattactactattatgcatttcgtgttctaacgatgaaacattagagaacacaaagaattccaaagatctggaagtggtgaacttaaacgactttgtcgacaatggcaacacaacaagatctggtaacgtagcgaaccaagcagttttgaaatttaaagattacaatgtctaccaagagactttgaacaaactgcaaggaatgagtctggaaaagaaggaagctttcttcaacgacttaggatttaaaggcgcatactcttctttaaaagaagcagatgacgaactcgacaaaatcttcgatatcgaagatgacaatgcttttcttgaggcatacaaagaattcaaagataaatacgaggatacatacctctttaatacagaaaatacgtatgatttatctccgtatcttccctttacagatgctgaactcgaacttctgggtagtaatcaaggctatctgattataggtaatgaagttattgcaccgaataacaatacgccaaactacaaatatactgcaacaaatgtgaacacacgtgcaggagagtttccatacgatcctcaatggcaagcacttgcaggagatgtacttggagtgacaatcaaaaaaggaaaatacagggttcttcgtcacttttggtggtaaatagtcataatccgtaaataactttcgctctcaacaattctattcctgctctgttatacattgtcctctttatgcatttaattctattaaccgtcccttcgagtaatgcattgctgtattcggtttgacttgcagcctttaccgcttgcttatcatcttctatattcgctgcgaatttagcgatagccttgcattttgcttttttcgctttcttcatccattcatccagagtagtgtctgcctctactcccttcagtattttcctgaagtctatgcataggtccaccgcgtgtgcaatggcttcatttgatttcatttttagatcaaacttctcatccttggttttccctttgaggagaaactccctaatgagggctacctttaccttctttttgatctttgactttttgagtttttcgttatgttccctgatttcttttctctttttggtatagacttccgttatagttctcatgagtcttgataccagatttgaatccagttttccttccattctcttgaccaatgtggctgtagatattattccatcactcactattttagccatttcagaaagatatttcatagctttcctttggttggtgttcagatgtactgagagtcctttcccctgcaggaggttgcgtacataagtcgcactttttcctatcgcggctagtatttcaggccttgtagccccttctattgtcatttgctttattttcaaatagttatttattctttccctatgccttttctctcctatgtcacacaaatccttaaacatatagtcataagcttcctctaatgaaggatagggataggagagcttttcattcgtctgataaagcgtcttttgaatgaattcagtcattcctttaagcaggttcttgaccaagtggaagcggtctgtaacctgaatcgctcgcggaagatgagtggatatggcccgtgcgtagtcatgagaaccgtcccgggttacaagctctatctgctggttttcttgcaaccattgattgagttcctcaccatagcggcagtcaaagatagccactggaaatcccgtatcctgatcgcatgccacacatttataaacatgcccttttttactggcaaaatcatctattccaatacgtgtacttgtgcatggagggtttgattcacccagacgcttcaccactctggtacacccggaggtactggcatggatattttgggatttcaaaaggagggaggcttttcgaccggacaggtacagcgaagtcttaagaatgcgctgttgtacttcatgagtcttgcgagcattagggccggctatggcaagggaaccggaaaatgtacgctggggacagtccggataatcacaataatagtagcgtactcgcacctgtattacaacttgcaaattaaaaagctccaggctttccaaagtccgaatgtagtatttgtggacatgatagcaaagtctaccacagtttgggcaggagcaactttgagaatgggtatcagcatgtaaagtacagcagcaatcagaaaattcaatattacgaatgagtaatcctttatccgagaatttatttttgaaccatttgcttatttgacaatagaggccactagttcgcttttttgtactatctttgtcttttgcagatatgttaatcatttggtaacttgttgaattgaagaaccataaagttactgaaataattacatatctgcaatcttaaacagacaatacatcactgtatatcagattattaacaataaaatatcgctttcttattttattcattataacagattttaccaccaaaagtgacgaagaaccaaatacagaagtgacatcactcttggtatagacaaatctggtaatattttcatggtaagaacggcttcacaaaagaaaaagaaattatggagcagaaggcatcctacaaactatgaggcagacttatgggtagaaggaggtcatgttcacatttcaattggaaatgatggtaatagcgatgcaagaaaatggccagttgcaataaatgcaagacaatacagtaagagcaatgtgaaatgcgcatttaggaatttcacaaccggatgttgtgaaggacaggttggtaatgtagattttactgtatatataccataaataaaactcacttcaggaaataaatgagaatataatcatagatttccgaaaacatactcaatactatggtttttacggagcaaaattcgtaaaaaccatgatatttttaatttattagtaaacctggcgaacaaagagagttaaaaatgaaagcttaactaacgaaagtaaagaaaaaagtctaattaaatatatttctagactattttattactctacctttgccgccataaaccaataaaacaagttcaagatgaaaacaaaaactttattcatgatgagaaaactattcgctacaatttgcctactgtgtatgatatcttcattatcgtacgcacaaaattttagatacggcttcaccggcggtgtcaacttaagtaaacctatgggagacatagaaccccaatgccaagcaggacttctcttgggagccaaaggagaactgggaataccatccgtaacaaaaggattttatacagaatttggtttacaattatctgcaaaaggttataaaatgcaatacgcaacgccagtaaacggtgacgaaagacattacacagagaatctcaactatttagttgttcctgtccatataggatacaaaatagaatacagtaaatcggtttcacttttcgccaatgtaggtccatatgccggagtagcactgtggggcaagcataaatcttatagaaacgaaaagaagtttcacactgaaagtgacatttttagtggtaaatatgggtataaaagattcgattggggatgcggattcaatgtcggtgtagagtatgcaaagcattttcaactctcatttggagctgattggagtttaatgaacgtatctaaagctaacgactatacatacaaaaacagaagtttcactttctctttgggatatattttataaaacttgaagaggagaaggacttcctttcaaaaatcctcctcctctttagcatcattaaatcccttgatatcatagcataaaaataaaatctataataataagacaaacataaatatttacttaataatgaaaaaactattcactataatttgcctgctgtgtatggtatccacattttcgtacgcacaaaatttcagatacggtttcaccggcggtgtcaacttaagtaaacctatgggagacatagaaccccaatgccaagcaggacttctcttgggagccaaaggagaactaggaataccgtccgttacaaaaggtttttacaccgattttggtttacagttatccgcaaaaggttacaagtttcaatacggaaatatggtaaataccgatgaaagacactttacagagaatctcaactatttagttgttcctgtccatataggatacaaaatagaatgcagtaaatcggtttcacttttcgccaatgtaggtccatatgccggagtagcactgtggggcaagcataaatcttatagaaacggaaagaagtttcacacggaaagtgacatttttagcggtgaatatgggtataaaagattcgattgggggtgcggattcaatgttggtgtagagtatgcaaaacattttcaactctcatttggggctgattggagtttaatgaacgtatctaaagctaacgactatacatacaaaaacagaagcttcactttctctttgggatatttatactaaaacaaaccgaacaaagagcaactgaaaaacaccatcttcagattatacaatagttacatttccaaaaatatcatgttttttacggaatgaaatccgtaaaaaacatgatatttttggatttgcgtttattatctgttatctttgctttcagaaaaaagcaataagagtatgataacaagagtattagaagaaagcatacgaaataaattgggacaagataaagccattgtcatcatgggggcacgccaagtaggtaagactaccctattgaaacatctgttcaaagaaaaagaaggtatattgtggctcaatggagacgaacaggacactcgtgcactttttgaaaacatctcagcaacgcgtttgaagtatatcttcggcaataataaaactgttatcatagatgaagcacaacgaattgaagacattgggataagacttaaactcatcacagaccaactgccggacattcagctgatagcaactggaagctcttccttcgatcttgccaacaaaatcaatgaaccactgaccggaaggaaatgggaatataaaatgtatcccctctcctttgaagagatggttaatcatcatggacttatggatgagaaaagactacttccccaccgactggtatatggctattatccggacgtagtgaaccatcccggctcagaggttgaaattctgaaacaactttccgacagttatttatataaggatatccttgattgggaacatataaagaaagccgacaaaatagtaaaacttttacaagctcttgctttccaagtaggttccgaagtttcatataatgaattagggcaactgtgtgatttagatccaaagacagtggaacgttatgtcattttattggagcaatcatatatcatcttccgcttaggatctttcagccgtaatttacgaaatgagctaaagagtagccggaaaatatatttctatgacaacggcatccgcaatgcggttatcgccaactttgcattagccgaaacccgccctgatattggagcattattcgaaaactttatagtatcggaacgaatgaagtttttgcattaccactgcctatggtataatacatggttctggcgcaccactgccatgcaagaaattgacttcattgaagaaggcaacgggcaactggcagcttatgagtttaaatggaatccaaagagaatcgccaaagttccaaaaacattcactaacagttacccgaacgctacattcaaggttatcacgcgagataatatagaggaatttctattataatatcaccgaccgccggttattacagaagtaactaccggaaaaatctttggcatgcgcaccctccttcaaccgcccgtaaataaacttccggttctctttcgagagttgggcagcaatagatttccataccatacggatgcgtggaagctcgggaaagtcgtccttatttttgttataactatccgaaagcttcacatagaaagggggggaaggactttccaatatgaagcccttctccccctttttattcttatcggagaacttactttatcctctctttttcttccgcttttttgcagactccactgcctcggcaaccaccggtttattttcaaatcgtttggtgtagccggtgtaatccggaatagtgcgttcatacgtcggatcaacaaatagcgggcttgaaataatatggtctgccgtactacggttacagcaaaaaacgatattctcaacaccggcaagacgagtcagcgctttcacatccgtatcgtgcggctgcaacgtcataggatcagtgaagaagaaaagataatcaatctcgccatccacaatgcgagaccccatttgctggtcaccacccaaaggaccggatttcaaaatggtaaaatcccactcaacatcaggatgcttttccttaagagcctcaagaataagagttcccgtagtacctgtacagtaaaacttgtgccccatgagcaattctgagttccagagaacccactctatgaggtctttcttcatggcgtcgtgcgccaccagtccaatctttctaactaattttgtcataaggcaatacgtttaaataataaacaatcggtaaaaagaaaaagctataattgcgagaaaaatttctttccacgtaaataatactgtgccaagatactgctttttgtccattccggtatcacggaaagggaagtttttttcaggttctcttcacgtgcaggagtaaaagaagaacgtaacaaacgatattcacgccgtgcgcgaagaactgccaatgcattggggaactgtagtttaagtataaaactcaatgcagctatatagtcaagaactgcacgggtacgcatcacggaagcaaaatccttggatggcaggttcttgtaaagcatgacaagattattacgaaaattgaggaaagtctttcggggattctctttcttcagcgtagcaccgcctacatggtaaaccacactttgcggcacacaggcaatctgccggccacgtgcacgaagccgccagcaaagatcaatctcttccatgtgggcaaagaaacgtccatccaatccaccggcttcacgataatctttcaggcggataaacaaagctgcacctgtagcccaaaagacgggaatgatagtgtcatattgtcccctatcctcttctaccacacccataatccgaccacgacagaacggataaccgtaacgatcaagaaaaccacccgccgcaccggcatactcgaacatctccttctgcctccaactgcgtatcttcggctggcaagccgccgcttcaggatgagcatccatatagtcaaccagtggctgaagccaatgttccgtcacctccacatctgaattgagaagtactacatactcagcatcgacctcttgcaatgccatattataaccatcagcgaaaccttgattttcttccaacagaatcaatcggacggtaaggaattcacgacaaagcatatcaacagatgcatccgtagaaccattatcggcaacatacactaccgcaccgtccgcttcagaaaagcgtactacggaaggaagaaacgagcggagcatatcgcacccgttccagtttaatatgacaactgctatcttattcatgctgtttcttcaaatcttcccgtgtgagtttccaccgtttatgcgaccagaaccaataagcaggagcacggcgaatggtctgctccaagcgacgcacaaatagttcggttatttctccctcggcagtttgcttcggggtttcagtcaacagatcaaagtatgctttgcaatatcctctaccccgtttttccaattcacaataaaaaacgggataattcatcattctggcaatacgttcaccaccatccataaatacggtatcctgattcaggaaagttgtccagtgatgggcttcattgcgattgggagactgatcggtaatcagtccgatcactacatgcttcccttcacggcgcaaccggattacttcgcgggcagtggaatgtttcggtacattatagccaccatgacgggcacggatgatcttaaacatttcatccatatacttgtttcgcaaaggtttatacacttgtaatggtacgtcttccggcttcatgaaggctcccatcgccgtcagccactcaaaattggcataatggggaatgagtacaacgatacctccatgtttttcgagcatggcaagatattcttcagtattaccatactccatacgacgggaaaggtcttcgaacgacatacgcatcatctttatttcttccagcatatagtcgcagatatagcgataaaactcacgctcaatctcgcgcagttcagcctcggatttttcaggaaaagaattcttcagattcttacgaactaccttacgacgataatgcaccacatgacgcatcaaaaaacaaactccatcggacaatatataaagtgcccgaaaaggaagcagagccagaagccacatgccagcgtaagtcagccagtagacaagtttcgatttcatacttttcttataccttattataatagcaccattccctgcaacgccgttccgtcttcattaaaatcgcccaaacgaacaggcaccacctgattatccaatgtatcattgtggggaacctccacgcggatatagttagcagtgaagccatgcataggagttcccggcttggaacgttccaacaacacaggcagggtttgtccgatatgacgggcatagaatgcatgcgtcttttcgtccgaaagttccaacagacgctgactccgacggtgttttttctcgggagttaccacatggtctatctttaatgcttgcgtacccggacgttcggagtagctaaacacatgaagctgggtcacatccaggcttttgataaattcgtaggcctgctcaaagtattcatccgtttcaccacgtgtgcccacaatcacatccacgccgataaaagcgtcgggtatcacttctttcactttccgcactttggaagcgaaaagttccgtatcatatcgccggcgcatcagcttcagtacttcgtcactaccggactgcaacggaatatgaaaatgaggcatgaaactgcgggaatgagaaacgaattctatgatctcgtcagtcagcaaattgggctctatggaggaaattcggtagcgctcaatgccttccacttcatccagcgccttcaccagatcgaagaaagtttctccggtagttttaccgaaatccccgatattgacacccgtcagcacaatttcttttcctccctcggccgcagcctggcgggcttgttccaccatggatgcaattgttccattgcgactccgcccgcgggcgaaaggaatggtacagtaagagcagaaataatcgcaaccatcctgtactttcagaaaataacgggtacggtcgccacgtgagcacgacggtgcaaacgaatggatatctttcagcgccgaagcataagcttctcccgactcattcttttgcaggttgccgagatattgaagcaaatcttttttctgttcggcaccaagcaccacatccacaccctcaatctttgcaacggtttcgggtttcaactgggcataacatccggtcacaaccacgaaagcccccggatgttgcttcaccagacgatggatagcctggcggcatttcttatccgccacttccgtcaccgagcaagtgttcaccacacagatgtctgctttctcgcctttacgtgccgtacgcacacctgcatcccgcaaaatcttaccgatagtagaggtttccgagaagttcaacttacaacctaatgtatagtaaaccgctgtcttatcttgaaatatattggtatcaatcatatctattctaaacacatttctgctacaaagttacatataattattagattttttctacttttgcacaaatcatcaattttcgtgcaatgatacaagagaactttatcaaactctacgagcagagtttccgtgaaaactgggaccttccttgctataccgattacggtgaagacgagagttattcctatggacaagtggcgcaagagatagctaaattgcacttgctattcaaacattgcagcttgcgccggggcgacaaaattgctattatcggtaagaacaatgcccgttggtgcatcgcttatatggccaccatcacttacggagctatcgttgttcccattcttcaagattttaatccgaatgatgtacatcatatcgtcaaccactccgagtctgttttcctctttacgagcgattccatctgggaacatctggaagaagaacgcctggccggattgcgtgccgtattctccctttccgatttccgttgcctgcatcagcgcgacggtgaaacaatcaatcgtttcctcaaacacctggatgaagaaatgcacataacttatccgaaaggtttccaccgggaagacgtgcagtataccactctttccaatgataaggtaatgctgctgaactatacctcgggcaccaccggtttcagtaagggcgtgatgctgacaggaaacaatctcgcaggaaatgtcactttcggtatccgcaccgagttgttgaaaaagggagataaagtactatccttcttacccttggctcacgcctacggttgcgctttcgactttcttacagctactgccgtgggtactcacgtcacacttttgggcaaagtcccctctccaaagattctgatgaaggccttcgaagaggtaaaacccagcttgattattaccgtgccactcgttatcgagaaaatctataagaatgtcattcaacctattataaataaaaagactatgaaatgggcactcagcattcctttgctcgacggacaaatctatgggcaaatccggaagaaactgatagatgctttgggaggccgtttcaaagaagtcattatcggcggtgctgccatgaacccggaagtggaagaattcttccatcgcatcaagttcccgttcaccatcggttatggcatgacggagtgtgcgccattaatcagttacgctccctggaacgaattcatcccgacttcttccgggcgagtgctcgacatcatggaagcccgtatctacaaagaaaatccggaggcagaaatcggcgaaatccaggtacgcggcgaaaatgtaatgacaggttattataaaaatccggaagccactaaagaagtcttcaccgaagacggctggctacgtaccggtgacttgggtaaactggatgaaaaaggaaacctttatattcgtggccgcagtaagaccatgatcctgagttccagcggacaaaacatcttccccgaagaaatcgaagcacgtctcaacaacctgcctttcgtactggaaagtctcgttatcgaacgcaataaaaaactggtagccttagtctatgcagattacgaagctttggattcccttggactgaaccaagaggaaaacctcaaaaccatcatgaacgagaacttgaagaacctgaatagcagtgtggccagttacgagaaagtcagccagattcagctctatcctaccgagtttgagaaaactcctaaaaggagcatcaaacgctacttatataacagtattgcagaagattagtatgttattaaacatacaaaaagtaatcaaaaggggctaacctccaaaaaaaacataaaaaaagttgggatttggagaacaacatattgaaaaagtacatacctttgcagcgttttaataaagcaattgattgtattacgtttttaaaaagcaaagaaaatgaaaaaattagttttgatggccgtagctatcgtagcagtatctttcgcatcttgtggtaacaaacaagctgacgctgaaaaagcagcagcagattctatccgtattgctgattcaatcgcagcagtagaagaagcagccgcagcagcagctgaggcagccgcagcagctgatactgtagcagtagatagcgcagcagttgtagctgaataattcagaacaacacactgagagaattgaaagtctgacgtgcgaaagcacgaacagacttttttttatacccatttgtaccatcccaaagatacttcagtgattcatcacttttcctatttgattagttctgaaaatccttatctttgctaatctacatattatgctaatattatgaatacaaaactgatagaaaaaattaagcgatcagctatcaagggaagattaggtgatttcatctgcaatttcattgagtcgtactgggtattgcaatcacattcgtgggaagtgatatgattcaggagcacaataagaaaaaagaggtggcacaggccctacagttggtcaaaagtgaattacttatcaaccgggaaacaatagaagagatgatgaaaatcgaaaaaatcaacaaagaaggtgcatgctacctgcttcaatataaagacaaaatgaatgaagcgtcctccgactctctgaactactacggctatttcccattccaatcacaagattttcttccggtcaccgatgctatggaaatgctcagagcttcttctgtcatgcaaaatattaaaaataaagagcttgctgtcgaaatcatccaggcctatgctgtaataaaaaatgcacatcttttttatgaaggattctccaaagcaaaagagacaggggtagagaagtgcgtcagtcagcaagaatttagaaaaatttctaatgaaaataagtcactaagagaaacctgggagttcacccttcacctcccggaagggcttgctgccatacggcaaatttcttttatacatgatgacccgcatctcacatacagccactacatggaactaattgataaaacaattacttttattgataaagaatacaattagaactaaccagtaataaaaaagcccggcttcctttcggaaaccgggcttcttttatatatgaagtttaattatgcttcttcagcaacaacttcgaaaggaatctctacagaaacttccttgtgcagcttaacgatagctttgtactggccaacttctttcacagcgtcttttacaacgatgatcttacggtcaatttcatgacctaacttagccaattcttctgcaatctggatgttaccaacagaaccgaagatagtaccggttgagctaactttagtagcgatcttcaaagatacgccttccaatttagctgccaatgcttcagcatccttcttgattttttccaatttgtgagcacgttgcttcaaatcttcagccaacattttctttgcagcaggagaagcaatcacagctttacctgtcgggatgaggtagttacgaccataaccggacttaacagttacgatgtcgttcttataacccaagtttacaatgtcttctttcaatataatttccatactttcctcctcctattatttcatcatgtcagttacataaggcaacaaagccaagtgacgggctctctttacagcttgagctacacgacgttggaacttcaaagaagtaccggtgatgcgacgcggaaggattttaccttgctcattcaagaatttcttcaagaattcaggatccttatagtcgatatacttaataccactctttttgaaacggcagtattttttcttcttaacgtccactgacggcggagttaaatatctgatttctgattgaacttgtgccatgattaatcctcctttttagttgatttaacacttcttctcttcgcagcgtattcagcagcgtacttgtcttgcttgaaagtcaagaaacggataacgcgctcatcacgacggaagttaagctctaacttgtcaataacagtagggtctgcattgaactcaatcagctgatagaaaccagttgacttcttctggataggatatgccagttttttcagtccccagttttcctcatttacgatctcagcaccttcagcagtaaggatgcctttgaatttttctaccgcttccttcatctgaacatcagacaaaacgggagttaaaatgaaaacggtttcgtattgattcatacttgtttaattaatgaattaataattcgtttaaaaatttgcggtgcaaaggtagggattttattttgatctacaaacatttaatgtttttttgtgcctgaaggtaggatttatcatagaagtgacttacctttgcaaagttgtttaaacaataatttcatgatcgagcaatttaactttgacatccggctgatttttgccatcctgaatggtaaagtttccgccgcaatcaaccgaaaactgtcccgtaacttccgccagaacggtttggagattactccggaacaatggactgtcctcatctttttgtgggaaaaagacggagtgacgcaacaagagttgtgcaatgcaacttttaaagacaagcccagtatgacacgcctgattgataacatggaacgtcaacatctggtagtccgtatctcggataaaaaagaccgccgcaccaatcttatccacctcaccaaagatggaaaagaactggaagaacgcgcacgggtaatcgctaaccaaactttaaaagaagcattacgcggcattaccgtagaagaactgagcataagccaggaagtattgagaaaaatatttttcaatacgaaagactgaaattcagtgatcagcgattagggtttagtgattaataatcttcgtttttcattcgtcattcttcattctttattaaaatatggtttttttgcaaaaataatttcgcttgttaaagaattatgcttttctttgtgacaagaatataataatctattaaaatacacacacatgaaaggtttattaaaaaatctgggcttgatattagtcttggtgggagctgtaatcttggttgcatgttcctttaccggtaatgtaaacaacaataccattttaggtacttcagctgttttgatggtactgggattgattacatacattatcatcaataagaaattggcagactaatcgtcagaaaaagaataaaaaaggcggttgctttggtagcaaccgccttttttgttttatgcaaggagtctatcaagactccggttccggtgtaatcaacttatatccctttccgtggatgttgatgatttcaatggaaggatcttctttcagatgcttacgcaacttcgtgatatacacatccatgctacgtgcattgaaatagttatcatcaatccagatggtcttcaaagcaaagtcacgttgcaggatttcgttagcatgagcacagagcaaacccaagagttcagactctttcgttgtcagcttcgtctgcttttcaggcgttgacaaaatctgtttctgtgtatcgaaagtgaacatacctatcttgtagatattgctctctttgttcttctttccacgtacacgtctcagaattgcttcaattctgaatgtcaactcttccatgctgaacggcttggtgatgtaatcatccgcaccgattttaaagccttccagaatatcttccttcagtgtctttgcagtcaggaagatgataggaatttcggcatttgcagcacgcacttcctgagccaaagtgaaaccatctttcttcggcatcatcacgtcaaacacacacaagtcatatttattcttcagaaaagctttgtatccagcttcaccgtcgggatataactccgcagaataaccttttgcctgtaaatattctcttaaaagcatgccaagattttcatcatcttcgcacaataaaatacgcagtttctcgtccatatcattaatttttaagtaaaggtaatgcaataataaatttagttccaacgtttagttcactctctgcccggatagttcccttatggtccgtaataatcttctttacataagacaatcctaatccaaagcctttcacatcgtgcagattacctgtatgcacgcggtagaacttttcaaatatttttttcaaattttctttcttaatacctattccgttatcctgaatagaaatcatcagcttgcccggttcattccaggtcttcactttcaattccaaatcggcatccggtctcttatacttcaccgcattatccatcagattgaaaatcacattcgtaagatgcatttcatctgcaaagatattcgggtctgttgcgttcagttccgactctatattaccgttataacgttctaccttcagggtgaatgtattgataacaccggtaatcaactcattggcatccagttccttcatttttaaggtagctttctgtttgtcgaacatcgacatctggagtaccttctctacctggaacctcaaccgtttcgtctcatcattgatgaccgtcgatatatgctggaacatggcaggcgacttacccactgcagggtctttcaacatctgcgccgccagcgaaatggtcgatatcggcgttttaaactcatgcgtcatattgttgataaagtcattcttcatctccgtcagtttcttttggcggaacacgatataaatcgtgaagataaacgtaatcagcaacacaaaggtgaatatcatcgacggtatcataaagttgatcgagtcgaaaatataatctcttttacccggaaaatgtatctttacgatactcatacgggcaggtggatcattcaggaacaaaggctgggagtaagaatactcgctaccttcatcgacatagtccgaacaacggtatacttcccgtccatcccggtcaatcaccttaaagtgatatcccagatcaatgccgttatctaccaagcccgactttaagtactgatccaggttcttaaagttgatgcgttcctcaatcggcttgctacttgccgtatataacatctgcaaggcaacttcatccaacaagccacgctggtacacataacgttctttcattaaatcaatttgtgtacgagctgttttaggaatcgtcttagcgccatgcttacgcgaaatcatcgctctcggcagttctgacggcttatttgtgatcgtctgaagttccatggccgaatacttggaaccatccggcgacgtcaccgtaaaccgttgtgtctgcaccaatgcctgtccttgctcagtcaattcccacgctctcttttctgcctcagagatgtcttcccgcaaccaacgggcaacctcagcggactccacttctttagaagcagccatcagtccacgcttcacagattcatcaaattgctcgttacgcatctttaccatcttctctatgtagctgatttgcagatacaagaggctgaggaaagataaccccataacgatgcctaatatccatattgttgacttcttcatagtcacaaaattaacactccctaattaacactcctaacctattaacctgatttaaccgcaagttctcgtaaattaaccgaaaagagttttttaagttgcattacgagcattataacaaatcagcgtgtgtttggtttgcaaatttaataaaaaattaatcattcccgttcacatttacgcatgttcttaatcagtgttaataaaaaagccattacccctcgttctgagggagtaacggctttaacaaattataaaaacagacgaagtgaagtcttttattcttcagcttgcttagcttcgaactccttaaccaacttatcttgtacatcacttggaacaagttcatagctggcaaatttcatgatgaacgaagcacgtcctcctgtcaaagaactcaaggctgtggagtaagatgccatttccttcaaaggtactttagcactcagcttttcataaccggcttcactactcatacccataatcatggcacggcgtccctgcaaatcacccatcacatcacccattctatccgacggaacaaatacttccacatcatagataggttcaaggatcttcggtcctgcattcttgaatgcttcactaaatgcattacggccagccaacatgaaggaaatttcattggagtctaccgggtgcatcttaccatcatacacgataacacgtacatcacgagcatacgaaccggtcaacggaccttgttccatacgagacatgatacctttcaggatagccggcatgaaacgcgcgtcaatagaaccacctacgatactattaataaataccaatttaccgccccattccaatgggatttcttcggtacctttcacattcatcttaaactcctgcgcaccaaacttataagtatcaggcagcggcataccttcgtaataaggttctacaatcagatgcacctcaccaaactggcctgcaccacccgattgtttcttatggcgatagtctgcacgagccgccttcgtaatggtttcacgatacggaattctcggttcctcatatttgatttgcaacttttcattattctccaaacgccatttcaacgtacgcaagtggaattcaccctgtccgtgaacaatagtctggcgcaattccttggattgctctatcacccaagtcggatcttcctcgcgcatacggttcaatatggccatcatcttttctgtatcggcctcattcacgggtttgatagcacgagaatattttgaattaggatatttgacaaagttgaaacggttttcagtacccttaccattcagagtattacctgtatgcacatcttttaatttcacagtacaaccgatatcaccggccaccatttcttccaccttaatacggttggcacctgcacaggcataaatttgggcgatacgttcttttgaaccacggtcagcattcgtaaagtcttcgccttcgtgcactttaccgctcataaccttgaagtactgaacatcaccgatatgaggttcaacagcggtcttgaagaaatagagagaagtaggtccattcggattcggttccacaacctcgccacgagtattgtgtacgggcggcatctcgtttacaaatggaaccacattacccaggaattccatcaaacgacgcacacccatatctttacctgcacaaacacagaatacagggaacatgccacgtgaagccagtcccttacggataccttcacgcatttcatcttccgtcagagattcttgttcaaagaatttctccatcaggctttcatcgtgttcagcagctgcttccaccaacgctttatgcaattcggttgctttttccatttcctctgcaggaacatcttcaatggtgggtgcaccaccttcggggccccacgaatattttttcatcaaaagtacatcaatcaacgaattgaagttcggtccggtagccaacggatattgcacgggaactaccttcgaaccataagcagacctcaactgctccagtaccatatcataatcacacttctcatggtcaagctgattcaccaggaaaatcaccggtttacctaacttttctgtatatcggaaatgattttgggtacccacttcaggaccatattggccattcagaagtaatattgcagtatcggtaacattgagtgctgtcatggcagctccaacaaagtcatcacttcccggacagtctataatattaagtttcttaccgttccactccacatggaaaacggtggaaaacacagaatagccatattcttgctccaccgggaagtaatcgctgactgtattcttggcagtaattctgccgcgacgttttataataccactctcaaagagcagcgcttctgtgagagtggttttacccgagccatcattgccaagcagggcaatgttcttaatttcattcgtctgatatactttcatgatatataagatttaaaatgaataactcagtatgccttcgcatacccttaatttttgtgaggcgcaaattatgaatttatcaaaagaaaagcaataaatcgatagtgttactaaactatgttatgtaacacatcactactaacagaaagattttcttaactttacagcataaatcactaatctttaaacttacaatgaaagcactgctatccgccaccacactgttgattcttctattgttcagcggatgccaatccaatggtgcctcgcacaggcaacggccattgatcggcatatcctgctcccaccccaatgattattcgactgcccgaatgacttacacagaatctgtgatacaagccggtggtactccgatactcatccctatcacaacggacagtacggttttggcggatatcgtcagcaggctggatgcaattatattaataggaggggctgacattcacccttcttattataatgaagaacctatcgagcaactgggggaggttgattcgctgcgcgatgtttacgacatcgccctgattcgtcttgcagcacagcgcaatgtaccgatgttaggtatctgtaggggtgagcaattgataaatgtagcgttcggcgggacactctatcaggacataccggcacaatacccggacactaccgtacgacataatcaaaaagaaccgagtagtgtgcccacacatacgattcatctcctgcaaggctccgcaatagctcagattacggggcaaacggagcttctcacaaatacgcatcatcaccaggcggtgaagcaggcagcacccggtttccggattacggcatgggccacggacagcattcccgaagccattgaaaatatcaatggaaagcccatttggggagtacagttccacccggaagcattaacagtagcaggcgacagtatatctgccagattcttccactttctggttgataaagcaacggcatttcgaaggagtaaataaacccggtgcctactcatctcgaaaggcataggcaagtcacttttgtttctcagttaaggcactcttgtttctcaggcaagaaacttttatttcaaagggaagaaacttttgtttcttaggcaaggcactcttgtttcagtgggaagaaacaaaatgggacaaacaagagcctgacaaagctaaagtatctctcctcctaatcacaagaaagggcgcaatcttacgactacacccttacttttatcaatagacttattttcataagatgaggctattattataataataggtacgcgcgtgtatcacatataatccaacttaatcacgatcacccttatatcctgatcttccttatccgtagctatctttgcaatatgccagtcggacgggaagaataagaagaactcaccgggaacagagtcgataaaggtagttttttccggattaaaatcatagtgaataacatcttttttctcactatattcgcaattagcctttgaagactcatgatccagcaatgcaaaacgctccgttcctttcaccacatactgcaaatctatatgtttccggtgtgattcggatgtccgcttctctaacggttcattcttactatcttcaacagaaaccacaagtgacgttccttctattggatgttttcccttctcgatagtagtcaggtcgtgcgacgccaaccagcgaaaagccgccttccattgttccggattcgcttcgtactgcgctttgaattccgctaaattcgtggaagaatgaggcttcgccttcaaaccttcactccagactttcgattttacccatttttcaggcgagatactttttactttcttgccactttgagcagagacagacagacaaaccgcaagcatacaggcagttgccaataaccattgtaagtgtttcatgttaatgttttctataatttcgtttactgactacaaagatataaattataaatcgtattaaattgaaacatctgtctacctatattgaattatttgtggaacattaaatgataagtcgttcttatctttgcaacagaaattaattcgtaaactaacaataaaccattcaaatcatgagaaacattttctggagtatgacattagttgttgcctgtttgtttggagctgctacagcgcaagcccaaaaacaagtaaccaccaacaatgccatcgtgccgggtgaagtatggaacgacaccgacggtaaccccatcaatgcacatggcggcggtatcctctaccatgaaggaacgtactactggtacggtgagtacaaaaaaggtaaaaccatcctgcccgaatgggccacatgggagtgttaccgcacggatgtaaccggcgtgagctgctattcatccaaagacctgctgaactggaagttcgaaggcatcgtgcttcccgcagtgaaggacgaccaaggccacgacctgcacaccagcaaggtactggaacgtccgaaggtgatttataaccccaaaaccaagaaattcgtgatgtgggcacacgtggaaagtgccgactacagcaaggcatgcgccggagtagccatcagtgactcccctaccggagaattcacctatctgggcagcttccgtcccaacggtgccatgagccgcgaccaaaccgtattcgtagacgatgatggccgtgcctaccacttttattcgtcagaaaacaatgcaacgctgtacatcagcgaattgactgacgattatcaaagaccgagcggacgctatacccgtaacttcgtcaaggaaagccgcgaagctcccgccgtcttcaagcgtaacggaaaatactacatgctctcttccggctgtaccggttgggatcccaaccaggctgaactggcagtagcagactccattatgggtgaatggaaaacaatcggcaacccttgtaccggaacagatgccgacaagacattctatgctcaaagcacttacgtgcagaaagttatgggtaagaaagacatgtacattgccatgttcgaccgctggaataagaaagacctggaaaactcacgttatgtatggcttccattctccttcgaaggtgataaaatcaccattccctggcgtgacaaatggaacttcgacagctttgccgatcaaggccgttttgaagccggcaaaggaactttcctgctgaatggcaagccatttgtggttaaagccgccgaactgcactacccacgcatcccgaaaccatattgggaccaacgcatcaagttgtgcaaagcactgggtatgaataccgtttgcctctatgtattctggaactctcacgaaccgcaacccggcgtatatgactttacggagcaaaacgacctggccgagttctgccgtctgtgccagcaaaatgatatgtatgtcatcctccgtcccggaccatatgtttgcgccgagtgggaaatgggtggtctgccatggtggctgcttaagaaaaaggatgtacgtctgcgcgaatccgatccttacttcattgagcgtgtagctctgttcgaagaagccgtagccaagcaagtgaaagacctgacgattgccaatggcggtcccatcatcatggtacaggtagaaaacgaatatggatcttacggagaagataagggttatgtatcccaaatcagagacatcgtacgtgccaacttcggaaatgacatcgccctgttccaatgcgactgggcctctaacttcaccttgaacggactcgatgatctgatctggaccatgaacttcggtacaggtgccaacgtcgaccagcaatttgccaaactgaaacaacttcgtcctaacagcccgctgatgtgttctgaattctggagtggttggttcgacaaatggggcgccaaccacgaaacccgtcctgctgctgatatgatcaaaggtatcgacgatatgttatcgagaggcatttcattcagcctgtatatgacacatggaggtacgaactggggacactgggcaggcgccaactctcccggctttgcacccgacgtgacgtcttacgattacgatgcgcctatcagtgaatccggtcagacaactcctaagtattgggcgttgagagaagccatggcgaaatacatggatggtgagaaacaggcgaaagtacctgcactgatcaaacctatcagcatccctgctttcagattcacagaaatggcaccattgttcgagaacctgcccgcagcaaagaaggatgaaaacatccgcaccatggaagaatacaaccagggcttcggaagcatcctctaccgcactaccctgcctgaattgaaatcgcccgctaccctcacagtgaacgatgcgcacgactatgctcaggtattcgtagacgggaagtacatcggcaaactcgacagaagaaacggtgaaaagcaattggtactccccgcctgcgtcaaaggttccagacttgatattctggtagaggccatgggtcgcatcaacttcggtcgtgccatcaaagatttcaaaggaatcacgaaaaacgtagaactttctatggacatcaacggatatcctttcgtttgcgacctgaagaactgggaagttttcaacattgaagatacctatgaattctatcagggcatgaagttccagccgatagagtcattgacagaccgtctcgggcaacgtattccgggtgtttaccgtgctaaattccaggtgaagaaaccaagcgatactttcctgaacttcgaaacatggggcaaaggactggtttatgtgaacggttatgcactaggccgtatctgggagatcggtcctcagcaaactctttatgtaccgggatgctggttgaagaaaggtgagaatgaaatcgtagttttcgatattgtaggtcctaaagaagctaagtccgaaggtttaagtgaaccgctccttgaccagctgcttgtacagaaacccttgacacatcgcaatgaaggcgaaaacctgaacttgtcaggtgaaaagcctgtattcacgggaagtttcaaaccgggtaacggctggcaggaagttaaattcaacaaacctgttaccggacgctatgtttgcattgaagcattaaactcacaggatggaaaagacctggcttgtattgccgaaatgtatttcttggacaaggatggtagccgtctgtcccgcgagccttggattgtgaagtatgccgacagcgaagacgtggctcacgtcaaccgctctgccgacaagactttcgaccttcaggaatccacctattggagcacagagaaaggtagtccttatccgcatacgattgtaatcgatctgggcgccagtcatgcattgacaggtttccaatgcttgccccgaatggaaagcgaagtaccgggaggcatcaaggatttcaagatttatgtgaagggggaaaacttcaaatactaatttgagtctatataatgaaagggactggatctttaacagaatccagtccctttcattatatagacttctattctaagtagtagacaacaaacaactcacattctctttattgagataactaattataaacgagagtaactaattcccctcctcttgggaggaggggtgcccaacgggtggggtggtagagaacactgggcagagaaagaagtatttcattttacctaccacctccccctatgggtactcctcctcccaggaggaggagaatgagaatagtacaaattaattaatgaccgatacttatttcttaataaagtatcacctgatccagcactactccttcatccaaagccgtaataaccagcttatgagaagcctgtttattgatcggtaaagtcactttccgaatagcctgattgcgcaatacattctctttccattcttcactgcgtcctttcgtctcataagataccgtttgcggaacggcctcatctacagatatagcgaaacgaagctgtttctcatccagtggatgacttggcaatagcctgatctcaacttcaacagaatcttttccataatcatcaaaagcgaaggtcagagaggaacctttacggatacctgccgcttttctttcatatcctaagccctcgtacggaacaggtttcccatatgtacattccatagcattccatttgcagagtattttccggtctgtcaccataggttcggtagcggtagtatgctctacacgcttgaataccggcaacttacggggttgaaaatccatcatacggttccatttgccattctgcaatgaattatactgctgcgtcaaggatgcaatgctgtcaaaagcagcatcactttgtttccagtcagccttagagtgacgagcaagctgggcagtcagaattttccggttcatttgtgcagcggcctgcaccggatatttcacaagctggaagtaagcatcctgcctgtccgccggaatgttactctccattctctcgacaacatcggacaagacggtataagatctcagacgctcactaatggtttgctcgctccaaggcagatctttaatcaccttgtatttcggatcgcgctcttcttcacgcgtatttcccataaattcgggcttacggatgtaggatagctggtaatgtgcttccatggcaggcaacagttcctcggcacaattacttccaaattcccgctccaaccaagatttcagatgggcagtgactcctatttcgttcacttcatcgatgttccacgccatatccagaaaaagttctatctgatattccgcaggcttgatatcacccacattcaatacccacatcttctgaatgccacggtcgtaagccaacttcatttgttgatggagtagataagggctgaaagttcccaaccaaagataatcgtgaggacggccccagtaagatacatggtaataaataccgttgcctcctttacgggcacgctcttccgccgtcgggaagtgacggatatacccgtaattatcatcacaccagatcaacgttacatcatcaggcacctgtaagccggcattataaatatccaacacctctttataaggaataaatgcttgcggaatagttgtaacatctttattgacatacttctgcaagagtccgcgctggtctttaagcacacgttccaatacagccttctgttctgctacggttttggctccctgcatctgtccgtcgtgcacaccacgcatacccaaagtatagatattaccttgttgagcaacctctttcacccggtcttcccagaatttataaacagacgcactattattcacatagtcataatcaccctgaccgcgacggcgccactcaccggcagcgctacacaccatcggctcacaatgcgatgaacctataaaaataccatattcttccgcaactttcctgtttccttccgtcaggaagaaaggcaaagtacattcgtgcatcgcaggccaataggtattggcacgtaaacgcagcaacagttcaaagatacgtgcattcgtcttcggaccgatatgtccttttatatccgacggttcatacgtctgactactccaaggcatcaatccccagtcttcgtcattgataaatataccccgatattccacggaaggagattgcaatgtctgatactctgccggcagcacaaaagaaatcttcttctccggtgttacatccgcccaccattcccagggagatacacctatcaggcgagataattccatgataccataagccgtaccatgcgaatcactacctgctaccagcaattttccatccggcagaacctgcaaaaggaaagcctgtttcttgcctatcaaagcacttacgtccgcactcacagctttcagcaacgggctttttccaaccgtacctactatgatattcccttgccgggcatctacggcggcagatgcagaaaataccgattgataatcacgtatgaacagtttcaatgcggtttgcactaccttctcttccgcattatcacaagccaacttaatcggttggtcggagcgcagactaaactgtgcacaacaaatctgtgtcacccaaagaaaaactaaacctataaatcccttcttcatatatttcaatttatttttcaaagctatattctatacatttcttcaaaaactgattttattatccttataatcggccgcatgcacttccggatcatgctgccgtacatacggtgccagtgccggaacaaccttagcaacagcttccatagcaatgccagccactacctttccgccataaatattcaaatgcgtattgtctatttttcctttcggacaaaaatcataaatccccgcaggcacccacataaagaggctttttgatttttctacgcccatacctaccaccaggtcatgcgtcagtttattcagatcgacaaaaggcacgtccatttcttcagctacccggcggggagaattcagatactctccatgcgtatccacaagcacatttccttccacctcataacttcctttaggctctgtcactccttcgggaggaaagtttctccgtacaatggaattaaacagtacaggataagcccccttttctcgggtttctcttacgaaacgacgcaggttatcatcgaatgtagttcccggatcggtatgcagtttttcggaagctttctcatcattgtgtccgaactgaataaacacataatctccctttttcaatttggcaagcaccgcatcccaacgcccttcattgatgaaactcaatgaactccgtccattcatggcatgattgtccactgcgacatcctccgtcagaaaacagggaagcatctgcccccaaccacgttccaagttaccgttcttcaagcttttgttagccatggtagaatcgcctatcataaagatggtgataaggtctttcttttccgttataaaggctgaaaagagtaatatcgcacagagtgcaaacagtagttttattttcagatttttcatactaagaaattttcagtaaaaataagtaagttcatagatacggcgtatggagctacgtacaattagatgtattatcgtacataaagaagtacattttttctataatcccttattgaccaacagataatacatttaatgtccaatcttggtcattagcttaaaagagtataatatagaaagaaaaaaaacaccaagtagcattatactcatgctgcttgattttaaattagatgtttccatagattaatcgtttttactaattcaattgatacatttctatctgatcaatcactactccttcatcaagtgcttttatagtcaaattgtgcttcttcctctttttaaccggaagaaccactcgtctgatagcctgattgcgcaaaacattctctttccattcctcactacgtccctgagtttcgtaagaaactgtctgagcattctttttatctatcgaaacagaaaagcgtaactgtcctccatgtataggatgatttggcaataaccggatttcaacttctacagaatcaccgggacattcgccaaaatcaaaagacaattctttgttcttttcaagcattacagccttttcttcataaccaagcccctcacaagacactgcatcacctgccgaatattccgctccattccatttatataaacccggggaatgctctaacataggtgtttcgaccgatgatctatctaccggttcaaatactggcaatctacgcggctgatgatccatcatacggtgccacttaccattattacgaatacctatattatatatgcgggtcagcgaagcaatactatcataagcagcatcacttttattccagttcatctccccatgacgggcaaactgtgcataaagcattttcttattcatttcagcagtagcctgtaccgggtattttatcaattggaaataagcatcctgtctatcctgttgaattcgtgaagccaacttttctactttgtccgaaatgacttggtaatcttcaagacgcttattgatgtacgacctactccaaggcatatctttcacaatccggtatgcattcgtatggtattcttcttcacgggtatttcccataaattccggtttacggatataggacaaacgataatgttccatcataaccggcaagaggtcttcacctatagcttctccaaactcacgcttcagaaaattacataaatgaccagacacaccttcttcgataacctgatcgatattccatgccatatccaagaatagctctgtctgatactctatcggcttgatatctcctacattcaatatccatattttttgtatgccacgatcataagcctctttcatctgttgatatagcaaagccggactaaacgttcctaaccaaaggtaatcatgtggacgcccccaatatgaagcatggtaataaactccatttcctcctttacgagtacgctctacttccatcggaaaatgctttatatagccataattatcatcacaccacatgagtgttacatcctcaggaacttccagcccggcacgataaatatcgagcacttctttataagggataaaaacttgtggaatagcctcaacatctttattcacgtattttcgtaataaatcacgttgatctttcaacacacgttccaacacagctttctgttcttccactgttttagcaccttgcatctgtccatcatgcacaccacgcatgccaaccgtatataaaatttcctgctccgaaacttccttaagccgttcttcccaaaaatggcataccgaactgctatttttcacatagtcgtaatcaccttttcctcttcggttccactcaccggcagtactacaagccataggttcacaatgagacccacctatataaataccaaacttttctgcagcttccctatttccgggagtgaggaaaaatggaaccgaacattcgtgcatggcaggccagtatgtattagctcgcagacggagtaacaattcaaaaatacgttcatttgtttgtggccctatgcgtccgggtttataccacggctcataattcaaactactccaaggcatcaatccccaatcttcatcattaataaagataccacggtattctaccgaaggagactgcaccatcttataatcggcagctaagtgaaaagcctctttcttctcaggtgttacgtctgcccaccattcccaaggagatactcctatcaaacgggacaattccattataccataggcagtgccaggtgaatcacttcctgcaaccaacagccttccacccggcaatactgatatgagaaaagcctgattcttactctttaagtctgatatatccactccggtagcggctattaaaggacttttatcaactgtacctacaataattccgccatggttaacactaatagtagcaggagcagaaaatacagtttcataatcacgtgcaaacaactgtaaagcagtttgtaccaccttctcttccgtattatcacaagccactgttaccgattgaccagaacggagactgaattgtgcactacaaatctgcgtaaccccaagaaacaataagcctaaaatacctatcttcatatattgtatttttttcaaaagtaataaatatcatctatagtcacaaaagtattgtcacttccatagattgtttttgatttatccgtccacacaggttttatacctgttacttcaaccaacaatgtataattacctttctccatttccggtgtcataatacggattgccttttctgaatatttgctataaaaatccactaacgaagaatatactgtatccttcttcgcattcaatacactcactcgggcatatccgctatggctatcagatttcccgacaactgctacatgagtccctctgaaaggtacagctaatacactgccttttgcatttgagacaaaacatcctctgttttcagtccagcccacagcaggttttatgtttttcatagatacccgctttcctttacgaagtatatccaccggcttcaaggtattaaagtcccaacactgccaatattcaggaatagataactttgtcccattaacttgcatcggcatccaaacgtatgtagcggctgaagcttgatgaggatatgaccatctatctcccataaacataggtacgatatcattcccccgcttcaagggaaaaacgaaagtactctgagaattataagtcaaagttccttcaggacagaacaagccttgctttgtccaagggccttctattttcggggccgtgaaataaaagttatcattcttctcccaactggtcagattagaataaagcatataataaatgccgtctttcttgaacatagcaggtgattcacctgagcctttcacatgcgcaacttccatctctattgattggtaatcatcactcaaccgatatatcggtccatgatgaatcagcaaatatcctttgccatccgtatcttgaaaagttcccatatcccaacgctgaacaggctttccctgataaagtaacggtccctgcaactgatattcgccattaatggttttacaggtggcatacccgatataagggtctttgtatcccatatcatcagcatgcataaacattacaaactcaccagtagaagggcatttcattactttcacacgttcacctacacgattaggccctaatatgccatccggttgcacggtcaggactatccgctcgaacttccagttaaccaaatcatccgaagagtagcaggaaaatcccggaaaagcattgctttcatctgatttccactcaccaaacagataatacctccccttttcttctacaatacaagcaccatgcgcattgacaatattgccatgttcatcaaaccacggcatgccatttcgaataaccttctccacattttgggcaaagcaatatatcccctctcctattcctccaatgagaagccacactaataatacatatttcatataccttatcaatttcttaaaaaataaaaactaatatctattcacgccattacacaagttgaaatcaaacagagtttcatcatcagtctgctttaccaaccaatctacttctgttacataaagaatgtataaataagagggaatatagaaactccctcttaaattatatggaaaaacaatcttacttgtctgtcatttacttttctgctgccatatccgcagttgtaggccaatatggattctgataaatcggagaagtttcaatattcttaccatcagtagatgttatttggaactgatcaatacgaatcggatcaagataatgagccattttccaaacaaaaccctcataagctaactggttagcagttttacgatatggaagcagatattcgctatcgttgggtgaagacacatttgctttgtcagtgccatagacaagtgtagtattaccttttgagtcatcataccaacgttccataggtgtattccaaagatgcataccttcgggaagataaggcgtaaccgtcatctgatccattgctctccaccgacataagtccatccagcgaagaccttcggatatatattcgcagcgacgttcacggcgaatattatacaaagtcttatctgtcaaaatcttccctgccgaataagctccccaatcattctcagcttccttattcaaatcagtagcagcaatagtagcatcaatattatcactaaccaaagcacggcgacgaagaagttgccaatattcacgggctgtattatctaaagtctgattacgttcatagctggcttccatataattcaataaggcttcagaagcacgatagatagggatacccaggaaacacttgttctgaaccagatatttactatcccaagctccacctttacgcagtgcataaccggtagtataagcatactgcacagcaccgtccgtaattttcggataaggctcgtccagccaaatattagtaagtcctgaaacactctctattaacacattcttctgtcccggctctttcaggaagacagtcaaacgactatcacggttggtgcgtacatcagcaattgtcttatcacccatataataaccatcaccgtccgcatatgtaccatgtgcataaaccggcaaaccatctgccattaggaagttctgtacaaagccacgagttacaccgacaccccagttaccttcatctgcagctaaagctacatcatgtccgcttcccaatccttgtacatattgtcgccacatcaaaacctctttcacacccgacaaatcttcctggccaaacatcgcaaagtaaggattctctgttgttgccagatcttgcttcacaatacccgtatttttagtcaggctcgatttatacttttcagccacctctttagaagcagtcatagcctcttccaaaaaccagttgatttcattgtcaatgttcccactcggatactgataattggcattatattctttcgttttccccggccagtcttcaccgttgggaacaaatgccgaacctttgaaatatttcagccaggtagcctcgaacagtgccacgcgcgatttgagtagtaaagccacatcacgattgatacgtgtagtctgaaaatcttttccatccatcaaagtcgctgctttatctaagtcagagagaatgaaacgtgcaacttcattacgcggagaacgtttggcagcatcagtcagtatttccatattatccgttaatggctcggtaacaatgggataatcaccaaatgcctgataacgtttaaaatactccaaagcacgtaatgtatacatctcaccaatataatggcgaatactcttcagttcacccgtaatcgtatttcccgatccgttcaaatcttcaccaaatcgtggcaaaacactggcaaaaaagaagttcaaatgatagatagtagtgaaagaccagtcgccagaagcattaggaactttccactctccggtacagaaataactgggagcatttgccgcaatctgattatctgttccctgatcattcgcataaataccataggagttaccggaatttccaggcagaacactggaataatacttatccgcataagcctgtaagtgtgaggcatccgtaaaaaatgtctcaggtgcaagttgtgaagtaggttctctatcaaggaaatcatcacatgataccatcaccccgctcaaagccgtagctatcaatgctaaaaatatatttcttgttttcatgatttgctatcaaattaaaaggttacacttaaaccgaatgaccaagtcgaagacaaagggtaagcattaccaccccaaccaccaacacaagtctcaggatcgaatatggaagataaagaggtgaacgttaacaagttctcacccgatacaaaaacacgacaattggaaatacccaccttctctaccacagacttcggtaacgaatagcctaactgtaaattcttcagacgcatatatcctgcattctgcatatagcggctttgagtctgctgattctttgcaccgaagcttgaaccaccggaatcaggtgaagtgatagggcgtggataataagaatctaaattaaccggtaactcataacctgccaatcctatcggctgatcccggaaataattgttatgctgttccaaaccaatggtataccatttggaataaccaccacgaacaccccagaaataagatgagccgcccggccagaagtcatgtttcaaaacaccttgcagaaaacaacggaaatcaaatcccttatagttggctgtcaagtcaatgccataaaagtagtgaggattactgtcacccaaaatctttaaatcgccatgatcatcccatgtacttgcacctttacttattttgccatcaccattcagatccttatacatgatgtcacctgctgcccactgcgaaccaatggcgtcttgtccacctttaggcaatgaagcaatatggttatccatctcttcctgagttttggcaatgcctactgtttcaaacccccaaataagtcctgtttttttgccagccatgtatgtgctgatagaaccagtcttgttaccgggataactgtcaatataggtaacctgatcggaaagtgacacagttacaccataattcaatccattattcaaacggtccttccaagaaagagcaacttcccaacctctggtctgaagatcacaattgtttgtattaggaacctcaatgcccaatgtattaggcatctggttagccggtcccaccattttcttggtgtagcggacaaaataatcagcagaacctgtcaaacgattattaaataatccccaatccaaaccaatgtcccatgtgcgaacagtttcccaagtcagagcctcactaatcaagccacccaccgaagcagtattaggttgcatgccattctgtatccaagcaccatttgcagcacctaaagacatcacacgataagtaggataatatgagcttgtattctggttacccaactgaccgtaagagaaacgtaacttcaactgatcaacaatactggtagccggagcgaagaacttctcttgtgcaatattccaacctgccgagaaagaaggggatagttgccagcgactgccgcggcggaagcgggaagtaccatcataacgcatattaacttccaacagatagcggcccataaaatcataatttaaacgaccaaagaaaccggctgtggcccattctcttgaataaccattcacccctgtcgtcttctcttcacctttaccgctcaacccagatgtcagatcgaactcccagaagtcttcatcctctacatacaatccgtatttggtaacgtcgaaataatgcagtttgaactcttccgcctggaaaccacccatgaacttgaagttatgtttatctgcgaaagtatgagtatacgagctataaacattcagattcagataattttctttctgatcgttttcttttaaacttgaatctttgttcgttactattttatcccccttcgggtcataattgtaagcaggaagtgtagccgctttagtactctcttctttaatactataattgaattctacatttgtaatccagtttttgacaggttctatgataaaggcagcctgatgataatgacgatccgtctgttgagttctttgtccaccttctgccagcgcacgaggattgtcatgattgaggtgaccattctggtcataaataggcatgttcggccagttagtacgtcccaaaccatcgaaataactatccgtaagactcgttggtctacaaatatcattgcgggtaaagcgggtagaatagttgaatttcaaccactttgtcaatgttccattaatttttgctgtcgtattgaaacgctgcaaattttcttttccgaagttgagaagtcctccctggtccagataattgaacgaagcgtaataagacatcttttcgctaccacctgtgacactgatattgtgttcctgagaaaacacatgatctttatacatggcatcccagatatctgtattagcatatccctgagtccaacggtcttgccaggcagtctcacttttagcatccaatccgacttctccattcgtaaactttccattctggaaatcaatcatcttctgcatcgtttcatccgaatatgagcctttgataccacgattggcatctgcatagttcatcatgacggcaaacgaataagagtccattgacttcggcatattgataggactggagacacggaagctattattatagttaacagacactttaccttcctttcctctcttagtagtaaccaaaattacaccgaacggtgcacgcgaaccataaatactggaagcggcagcatctttcaatacagaaatattctctatatcctgcgggttgacagtattaatatcgcccaccataccatcaattaaaatcaatggagagctattggaaccagaaccgatagtacctgtaccacgaacagatatattcatgtccttttctaactgtccggaactggtggtaatcttcaagcccggtactaaaccctgcaaagcctgagttgcagaagttaccggacgcgattctatttctttggcagtagcaatacctacggaaccggtcaggttcaccttcttctgcgtaccgaaacctactactacaacttcttccagcatctcggtatcttctttcagggtaacatccagtattttccctgccacaaccggaatttcctgagttttaaaaccaatataagagataacaagcgtggcaccctgatttacggaaagcgagaaattaccattaacatcagtaataattccgtttgaggttcctttctcctgaatgctggcaccgataacaggttcgcccattgcatctttcaccacacctgaaactttgatttgttgttgagccacttccagattagtctcattgccctcagccatcactgccaacggacacccggtaatgaaactactacaaagtagcaaggctgccagtgccttccgattgtttctaaatgaatctgatttcattgtttttcgttttaatatgaatataaggttaataatccctgcgttacttttttgaaaagataacgatgcaaatgtaagagtgatatattaaaaaggaaggggtagacttgtcaaataggaggggagattgttcactgaactatttccccggcttctttgccctatttgcccaatatcctacttcaaccttcatgattctctagacacgaatatacaagagaatcttaagaaaatttgaaagatgcccaatttaccctcattaaatgcacaatctccctctatttaaacactccagacatctctatctttgcaatcaaatatttaattattaaaagtatcatttactaatttaaaatataactattatgaaaaagcactatgtggtatatcatttataccttgtaagttttgtatgtctcctgtttatttcctgtagctctccaaaggtatcttacaatgaaattaaagtggctgcccctttccccatggaaccgatcaaagaatgtatctttcctgagaaagattactccatagcggattacggtgccatcgaaggagggaaacatataaacacagaagctatcagtaaagccatcgaagcttgcaataaagccggtggagggcgtgtggtcattcctgccggtgaatggctgacaggtcccatacatttcaaaagcaatgtaaacctccatctggaaaaagatgcagtagtccgcttcacggataatccagaagattacctgccggcagtaatgacctcatgggaagggatggaatgttacaactactcaccactcgtctatgcctttgaatgtgaaaacatagccatcaccggagaaggaatgctaaagccccacatggatttgtggaaagtatggttcaagcgtcctcaaccccacatgaatgccttgaaagaactttatacaatggcatctaccgacgtaccggtagaacaacgccaaatggctcagggagaaaaccatctgcgtccgcaccttatccacttcaaccgttgcaagaatatactgctcgacagttttatgattcgtgaaagccccttctggactatccacatgtatatgtgtgatggtggcattgcccgcaacctgaatgtgaaagcccatggccacaacagtgatggcatcgacttagaaatgacccgcaacttcctgatagagaattgtacattcaaccaaggagatgatgccgttgttataaaagccggaagaaaccgggatgcatggcgtctgaatactcctaccgagaatatcgtgatacgcaattgcaccattcaggatggacaaacgttacttggagtcggcagcgaaatatccggcggtatccgtaatatctacatgcacgactgtactgcccctaactctgtccaccgtcttttctttataaagaccaaccatcgccggggtgcctttgtagagaacatttatatggagaacataaagacgggaggcacgctgagagtttttgaaatagatacggatgttctgtatcaatggagagatctggttcccacctatgaagaacgcatcactcgtatcgaaggtatccacatgaataacatcacttgcgaatctgcaaagatgatttatgaaatgagaggagataaaaaactaccggtaaaagacatcgagctcaaaaacatacatgtgggttgcatcgccgacagcgtaaaccgggtggaaaatattgagaatataatcacggaaaatatcacctacgacagtatagatactaccttactgaaggaactggacagatacattactaataaataattctctcagagttacccctattaaaaaggtgttacccgtcgccaggtaacacctttttaattactctctattctcaatacaactttattcttccataagctgaagttcagccacatgtccggcgccatcccatctggactccaaacgaatcacattacctgttccaggtttaagttcggcagcaacttccacatactgatacgtatcccacgaaccagtagaaggcaatcggaggcgtttctgcactccattcactatcaggttgggagtagcgacttgcgacttcccattggcataacgcaatctgatagttttctgtccgccattctttccatccacatctttccagatagcatatccacctgccaacggaaagttcagataaccagctccggtgaaaccgatgcaattttccgcatcagcttccaacaccacacccccaccaaactccatgtgctccgcaggacaaaccacagatggcatcggttgcgcagcacgaaccaaacgaacagtttgacaaattcccgcatccaacgtaacaatgtgtttccgcttatccgtctggaaatcaacagtaccttcgtccacccaattattatgagcgtcaaagtatcccttacttgcagataggatattcagagaatcaggccaggagaaaactccacccttagaagtagccagcactatctcactgccgctacgaaggatgctaaccgcctgtgaattaatatatcccggagtaaaggagataccttcgactcctacggtaggcatcagcgaatcacctttccagttatgcacaaaaagaccgtatctgctggcattcaccgctatatctaccatgacactattcagcattttattaaccaacttcacatcttccagatagataccacgaggtgcgaaaccgtctttctcatcctgtacaaaaattcccaagtcgtccgagccgcacaattcataataatcaaaagcattattaccggacaaagcagcaaggtgcaactgagctatattgggtacacgagcccctatttccataatcatacgaaaattctttcccatataaggtacattagtacgtgtactttccgcaaaactgtcttccgtctggaaatggtggcggtacgtatcgatacctacaaagtctatataagtaccggttgttgaacgcatttgttcattcgtataaagtatggagtggagatcgacatacgtacagttcattcgtgtccataccgagtaaggggattcttttacagcccgtcccaattcgctcatatattctacaatagtggatgacggaaagctacgtacttcattgtttagttgcacaccgatcaaggtatgtctggctccattctccgcatcccagcgggcgatatgctccatgacttttcctaaaacataggcctcacgggcacatagcttcttatcattcaagtctaaggtatagtctgagatatcacgccggattgtaaattcactggtagtttctttagaactacctgccgtagagaaagactggaaatcaccggctttcggagagtgcatcacataatcgggagttcgcaattggtcgggcttcagccattgtacatgtccaccgctgttctgcccgaaccaaagcatttctaccttaaaattatatttctgtgccagtcccatgtagagatccagggtggtccagtcaaatttgtctttagccggttccacttccacccaatgaatagggatggaaagggtattgaatcccagtgcggcagtttctttaattaatctttcgcaggtggctatatcccaattccaacggtagcgcaatttgtcgaaacgcacctgtacattggtcatatagaaaggtttgtcgtccactctcagcacatacttctgtgaaccgttgagtgaagtgtctacataagaaattactttcttctgagagtttttccccttgcctgcaatggcaggaggaagtaagagcgccatacataataaaataacagacttcatacaaattgtagttctgtttacgaaaaggttcgttttcatgatacttctactgattttaaatgataaaagacttattaaattacaatactcccataccaaaaggagacagacaaaagtacgggtttgacttcggaacaagcagtgagatatcgggagaagagaagggtgaaaatggtcaatatacaatcaagttgtcccatgttaatgaaaaagttctcttctcttcatcagaaagttcctaataatgcaaaggaaagtttgcggcatcgaataaaaagttataaattgcagcttcatttatatattcgtaatctacaaatatgaattcgtaaattacatttttatattcgcagactatgaatatacttttttattaactttgacaggttttgtataaagagaaaataagttttgtacgaatagagagcaggtttcttccctatacggaacaaacaggaaacatataactactaaataaatctatttatggctgaatatgaaatgcaggagatgaacctgccaaacaaagacgggaagcgcatactctatccccgcctcgtacaatccggacaagcaagtacggactacattgcaaagatactgtccgaaaagagttcatttaccagaggtgacatcaaaggtctgctacaggaactggccgatgaactggcttaccaaatgggacaagggaaatcggtaaagttggatggaataggaacctttgttccctcactggctctgcgtatagacaaagaacgggaaaccggagaagcagatagcacccgacgaaatgcaagaagcatcgtagtaggcagcatcaacttcagagcagagaaatcattaattcacaataccaattataactgtgatctggaacgttcgcaacagaaattctgccgttcctcgcagaaatatacaccggaagaacgcttggaacgggcaaagcaatatcttaccagacatccttatctgacggtcaggaattatgtccagctaacagggttgcgccccactaccgcctctgtagagttaaggaaatgggcagagaatccggaaagtggtattacaacttccggacgaggcacacataaggtgtatatacaaaggtaaattcgtcaaacagcagggacagattgggcaaaacacctgtttggaatagctgtaacgcgaatttattgtatttttgttgcaaagacaaattcataaccaaactgattatggaacgacattcatccctattgattctattgtttttgttgctttttacaacaagcggcacggcgcagccttacatattacaacacctaagtatagaagacgggctatcgaataattatgtccaggacattgcgcaagataaacggggatgtatctggattgcaaccgtactgggactgaaccggttcgacggacttaagttcaccacttacaaaagtactaattccaaattgggaaatgatgcgctgaatacgctactctacaatgaagaagaagatgaattatggataggaagtaacagcggattgtatatactcgattgctctacagagcaattcagaagatgcataccctcagaagatattgcaatcaacaatgtctcatacttggctcctgcttctgatggcggaatatggattgtcggtcacacaggccaaataatacactataacaaaaaggatgagaaatacacctcattatcagatcggatcaaaggggaactgaaaccgtcaagctggtgcgctttcgatgacggagaaaggcatctgtatataggacacgcacaaggtggattgagcatcattgatctggaaaacaaaacaatccgcactctctccaacattcccgagaatcccaacagcctgcccggaaacagcgtttatacaatctataaagaccatctggagaatatctgggtgggcacaaatcaagggctcgggctgctcaatcctaagacagatgaatttaccatcttcaaacatgagtccaataatccacattcactgatagccgaccatatatatgacataaaggaaatggaagacggcaccttatggatagccagtgacatcggcggaatcagtatactcgatttgcataacatcactttcaaatctccccaaaacgtacagttctataacatcactgcaacgatggataaacatggactttcatcaggaaatatacgaagcctgttgcaagacaagtttggcaatatatggataggtaattatagcagtggagtggactttatcagtcatacccaacctatctttcatacacttccctataccacccagggcaaagataaacagaaaaacaaaccggtttggggactatttcaggccagtgaaggagagatatggctgggtggagaaaatgaggcagttgtatttaaagacaataaacaactgaaaagtttcgacatcacgaaatatttatccagaccttacggacaagtattttccctccatgaaatgactcccggcacttttctgcttggaatatacgatgacggcctgctgaaactcgatacaaaaagcaatcgaatagaacgtataaagctcgacatgagcaacatagacattctttcctttttcaaagacaacgacggaaccatgtggataggtgccgaatacggcatatacacctataaagacggagtcatacggaaagaggaagatattatccgggaactgtccgataaatcgatatatggcattttacgcgaccggcaaggaaggttatggatgggatcttatggtggcagaataacaatattcgacaaagattataaagtggttacgcggttagatcacagcaatgggttcaaaaccaacggaatcaatgatctctttatggactcgcaaggtggtgtgtgggcagcaacccgcaatggaattggttatataaaagataccagtaaaccggaagaatttgaactctatggttacagccacggacttgaagatactttcgtacgcagcatccaagaagatttacaaggaaatatctggatcagtaccaacaatggcatttctttgtggaacaagcaaaaacagcaatttgaaaactatgattaccgagatgggataccgatgggaaatttcatagaaggttcagcctgctgcacaccggacggtactctctacttcgcctcactgaacggtgtctgttacttcaatccgcaaagcctgactacggaccgtcaagtagcccctgtacagattatggaatgcagacacctcaataaccagatagaaagtcgccgagcggaagcattgattccaattacaaacgggcacattgatttaccgtacgaccaaaattctttccggatcacgttttccatatcggactattcacaaagtgggcaggtagagtatgcatatctgatagaaggattggagaatacatggaccaatactttaggcgagagccagattacattccgcaacatttctcccggtgaatatacctttaaagtaaaggcacgtttgagaaatcaggaatgggacgacaatcatgtggcaacattgaaagtatacatccatccgccactatggttgacgtggtatgcaaagattttctacatcctgctggtattgctgggcatctacagttggttccgtttctacaaacgcaagttgctgttggaaagctcactcgaactggaaaagaagaagagccagaacgaacaggagctcaataacgaacgtctgcgcttctataccaatatcacgcatgagttacgcacaccgctgacgttgatactcggcccgttggaggacctgattaatgatccgaaaataccggctttctacggtaataagattaaagtcattcacagcagtgcactacgattgttgaaccttatcaatcagatactggaattccgcaaaacagaaacgcaaaaccgaaaactgaccgtagcgaaagggaatctgagtagcctggtgacagaaacaggactgcgctataaagaactgaacaggaatgagaaagtgaagttccgcatcaatattgcagcaaaagactcaaaggtttatttcgataccgatgttatttccaccatattgaacaatctgctgagtaatgcgataaaatatacctcagaaggagaaatcaacctgatcctgcgttctaccgatgatggaggaaatcaatatacggaaatcatcgtaagcgataccggatatggcatagatgctgaggcacttcctcatattttcgaccgttactatcaggcaaaggggaagcatcaggcatccggtacgggcataggacttgctttagtaaagtcgcttgccgacctgcacgaaggaacactccaagtggaaagtgaaataggtaaaggaacgactttcaccttccgccttttgactgaaaacacgtacccgaatgcgctgcacagagaggaaaaggaaacgctcgcacaggaagagacagaaattgcggaaacggtggaagaagaaaaagaagaggctgatacccgccctgtagtactggtagtggaagataatgacgatatacgcgaatatattgccacttcattcagcagcaactaccgcattttgacagcaacgaacggtaaggagggcttagagcaagcacagaaatatattccggacatcatcatcagcgacatcatgatgccggaaatggacggcatcgaactctgcaagctggtgaaggaagatatacgcaccagccatatccccgtcatcctgctcacagccaaagattccatccaggataaagaagaaggatacgaaagtggtgcagactcctatctgaccaaaccctttagtgccaaactgttgaacagccgcgtacacaacctgctggaatcccgcaaaaagctggcacttatagtagccaaccgcaccaaagagttgaaaccggaacaacaggaagaaaccatcaaactaaataagctggatgaagaattcctgactaaattcaccaccatcgtagaggagaatatagacatggaaaagatggacatgtccttcatgatggagaaaatgaacatgagccattccacactctaccggaagatcaagagcctgaccggaatgtcaggcaatgaactcatccggaaaatcagactgaaaaacagtttgcggttactgatggaagaagggcataatatttcagaagcagcctatgcaagcggcttcaatgaccttggatatttccgctcctgcttcagggaggaatatggaatggcaccatcggaatatatcaggttacggaaatcgtaagactaacgccccgtagcctgcaaatattcgcacttcttcacctcataccgggcataagactccacatagcggtccttactttgctggaaaagcgtctgagcatccagtaagtcattcatcgtacaggttccggccttgtagtagtccgtattcaggcgaagattctccgtggcctgttcaatggatcgcatggatatttgcatctgtttataagcatccttcaggtcgttccaattctgctgcatacggaggataagcagttcgctctggtccgtaaactgattctcggcattgcgtacctggagttcctgtttccgcacgtcatgcgagccgccccaccaaccggataaaggaattgaaactgtggcaaaacccatccagaaagggtggtccttatccattaggttgtcatacatatatccaccgccaatggcaacggtaggcagatatttgccaacggttatgcggcgttgcagcttattggctttgaggttttgctgcaacaagtgatattcattggtcagaaccagagaggactcagggttccggtaaagtccctgcggatgttccggcaagacttcgccagcgacaggaggaacatccacaattccggaatcttctcctatatactgtgccagcatttgttgtgaaagcgtcaacgcattctcaatctggctgcgactgctctctatctcgttctgccgcaactgtacctgaagcaggtcattgcgcgttgtcactccggcatttaccgaagcttcgacatctttcagcagattagtcaactgtgcctcgaccacggtaatggtctgcaacttctctttcaacatcacaacctgccagtaatagttctcagtagtaagtttcacttcattttccgattggttatattgcaaccggttaacctgaatgtttaccttcgccaacttattaccgtttacaatctgccctcccgtgaaaagcggcatcgaggccgatacgccccctaccactcctttcttcataagtgacatttgcattccaggtcccatgtccaactgaagtaatcctttgtcggccataaatcccgtacctgtcgcactcaaagaagggaaatacttggtgaatgcttcctgactgccttgtttggctatttccagattattgccggcattctttatccgcacattgttttcaagagcccgttgcaggcattcgtccagagtatacacacgctgggcagaaaccgaaaccaactgtgtgaaacctactaataaaagaaatatatatcgattcaatttctgtttcataatgctgtatctattgattgttttactcattttccattttctccatagctatgcgcttacgtgtagaaccactgaacatgaaccagtagcagaccggaagcactgtaagcaaaaataccattgtgatgagtgtgccgtaacagataacggttcccattggcatccacagtccgctgcctcccagtatcattgggatgacacccatggatgcagctgccgaagtaaggaagatgggacgcatacgacgacgggccgaatgataaatggcatcgcgtacacccaacttttccgttttccgtaattcttcagcgtagtctatcatgataataccgttacgtacaatgatacccatcaggctaacaacgcccagaatactggttacgccgaagtccacgccctgcacaagtactcctatagccgttccaaacacgcaaagggccatacaggcaaagatgagcaaggcaatattgacattgcggaaatgaatcagcaagataaagtagataatagcggcagcaatcagcaatccggccagaatgggaggcagtttctcttcactatcttccaggtcaccgccataagtcaggattacatcaggagaaaatgaaagattcgctactgctttctgcactttgccggttacgtccataccattctcaccgcgctgaaggtctgccatgacagtaatcgtataaatgccgttgcgacgtacaatctgaccgttctcccatgccggaaccacatcggccacttgccgcaaaggtacattcgccagtcctccggcaacaggtatgagttcgtcttccaaatcacaactgttggccgaatccgcctgggagttcttcaacttgacagaaatatcgtaatcaccttcccaaacggttgccacggggataccactgccgtaacgcatggcaagggtggtttccagcattacattactgatgcccaaccgggtggcttcatcctctttcagtacgacgcgggtagtggcaagcggatcattaaagttagcacttaccaataccagttcgggcatggagcgcaacagtgccgtcaccttgtcggcttcacgacgtaatgtgtcgatattctcaccactgaggcgtacttcaacagggtacgttgcttcgttatagctcagttgcttaaagcgtaccaaggcttccgggaagtaatcggtatacttaggtgcatattcattcagtaggtcttccgtcgcttgattgcttaccgtattgacaatgaattgtgcaaaattagtcccggctatctgtggagcgtaggctgtctggaaacgtggagaagcacaacccacaaaggatgccacagacactacacgcggatcattgcgcaggatatgttccaggctgtcggctatttgcccggtcttctctacagcggttcccgtaggcagggaaatttccacagcaaactggttgcgttctgctatcggcatcaatctttgcggcaatttacccatcaggacgatgcctatgataatagaaagaagacctaaagccatcgtcatacggggccaggtgaaacagagatccagtaatttattatagtatttctgcaaggcatcgaggaaggaaaacttctttttcccattcttatttgttgcgttctccatcggtttgcgaatgaaatagaactgcatgaacggcaccagcaatgcagccaccaacaaggatactcccaacacgatgctgatggcccaagggaaactaaccagaaaatcctgtatctgtcctgttgttgtgataaggaaggggaaaaaggtgatgctgatggcacacgtcgccgagaatatcgatttaaagaaatgcgtagcactctgtatcgaagcatgccagcgcgacacaccttcacccaacttttccagatagctatcgataatgacgattgagttatccacaatcatccccaaggttacaataagagccgccaaagtcacggtattcagttcgatatcaaaggcatgaaacaatcccaatgatatgaatattgtaataggtatagtggaagcggctaccagtgccacacgcataggcaacaggagcatcaccactataatcaccgctataatggcaaccaacagttcgtgcaggaagttatccacactatctcctactacctggctctgatcggtgatacagaaaaggttgacatccgacggtaatgacggttggaactctgcaatcgtccggtttatctcctctcccatttgaacgatgttcttgcccttcttcatctctatacttagcaaaaggcattttttaccattgttagtgatatagctgtcgggggcaggatattcttttatcacacgagccacgtccttcaggcgaatgttatttcccatcggatcagtataaacaatttgttcctgcacatcgcgtaccgtattcaatgacttagccacatagacaggctgaacatatgcaggattcttcacccgaccgcccgaagtagtgaaacctttcgtaaaaagggtaacggcgagtgtctgttcagtcagcccatattgcgaaagtttatgggtatccaagtatatggagatctgttccttttgcattccgcttaccgtcatacgcccgatgctgttgatacggcgcaggcggtcttgcagggcgtccatatagtcgtccagttcacgataggtcttgtccacactttccatagtgatgagcaaggcggaagtatcgccaaaatcatccatcacctgtacagccagtacattcttgggcagttgcgccttgaaagtggaaacaccgtgcttgaacttgctccagaattcatctttgttattcagctcgtcattgagttgtacctgaatataaacaatgccatcgcggctcatggagaaagtcttatctttcttcacttctttatagctgaatatataattttccaagggtttggctacctgttccaccatttcctctgccgtgttgcccggagctactgccactacaataccctgacggattgtgaagtcaggaaattcattcttgcgcatattcggcaaactgtaaattccaaaagcaacaaggcaacacacaacgagaattataatctggcgatagtgcatcgcccattctactgcgttacgtttcttattcattatcttatattttgtcggtgatgtgactaatattttgattgtccctcatttagttataaaaccacggatgtattctcacataccttctgctgtccttccacaatgatttcctcactctcctccaaaccggacagcacaacgactccttcacttgtaaatcctccgcattggataatgcgtttactggcttttcctccggcattcacccagacgaaggaatggttctgttcgtccagttggacaatgtgggcaggaataacatgaagcgttcccatccccgtaccggacaagaccgcttccaccaccatacccggcatcaactctttatcagcatcatccacccgtatcttgacatcgtatgagcgtgaaagcggattggctacaattcctttctctgttactgttcccgcgaagatacgcccgttcaaggcagaaacggtaattgttgctttttgtcccgtggcaatggcagcaatctctgtctccggaacggcaatcttcactttcagcagattggctgtcactaatttgaccaccggtaagcccggcattatattctgccctacctctgccatcttttccgatatgattccactgaagggcgcatagagtttgcaatcatccaggttcttacgcgccacttcttccattgactttgcctgttgcaacttactctgcacttccacccactttatctcgggaaggcttcctttatcatacaattccttcattctccgataggcatcttccgcttgtgccagtgaagctttggcagcatcatagctgctctgcatggaaaacggatcgaccgtagcaataagttggcctttcgctacccggtcacccaaacccacatgtaccgttttcaccgttcccataatcgaaaagctaagcgaagtgctgttcgcttcttccaccgtaccggaaaaacgttccgttccatctatctcagaagaagaaactcgtaaaactttcacctttaccggactcatagtagtctgtttgtctccattattctggcaactcgtcaggccaaataatagcaatagcaccgttacattacaaagttgtctcatacttttttccatttttagttcattatttccggtgcaaaggaaaatgatttatcgaaagggcttaatttccatattaccacagaagtgttctatttttcaaaacaaatatcaaataagctaaataggacattattctggaaatatctatcatctacatctaccggatattctgtttatttgcaaccaaaaagaaatatagtgtatggaggcaaagctgagatcaggatgtttggatgatgtcttggtaaaaaagatatctgcatataatgacagccgcatagctatcattgatgaattgcaaagtttaaatatagaacaggctgtaaaagttgaggcatacatcatcttgttgtgcgtaaaaggaaaaggttcgctctatatcaatggagaatcgagaatgatacacgtgaacgatttgttcatttgccatcctaatatcatattggaaaatagtatgataagtattgattttgaatgccgttgcatctgtctgtcatcggagtacatgaagcaattacttctcatagcgggcgaaagctgggacttgaaaatgttcattgagaaaatccccattctttcactgaatgcagaagaggcagagttgttttgccaatactattccctgttgcgttctaaaatgctgggtactccctgcaaacatcaaaaggaactgatcgactctctgatccaagcatttctttatgagtttcatgatgcactggaacgcttcatcaagctgaaaccaccgacattcacctcgggcgaaaacttatttaaggaattcatcagtctcttgtcttcatcataccccaaagaacgcatgattggattctacgctaaccaactgtatgttactcctaagtacttatcggcagtctgcaaagaagtcagtggacagacggcttccgaactcatcactcaatacatggtgaaagatattttgtatctgttgagaaactctcagaagagtattaaagaaatagccaatgaactgaatttccccaatctgtctttttttggaaagtacgtaaaacagcatttgggtatgtcgcctaaacagtacagggaatcttcatatggttaatataaaagggcaatcttcttgattcgaagattgccctctcttataaatactacctactgaaaactgtgacttaaaaaactaccctttgtttattaataccaatcttatgttaatctataacctattgtcgatgttgcaaagatagggtgaaatttctattcagtagtagcacaattgtttcataaaaggtgataaatcagtcaattttcagtttatcccccgacaaatcgactttaaacaggtgcggaatacgaatatatcgcccgttcacatctttatggctatgaaccgacatcatccactcaccatccaaagtacggaacaacattccatgtccgaagttaggcggagtgattggttctttctcttgtatccaggggccatccagagttccgctttcggaataggcaacgccttgtgtatagtcctggaatacccagcttgtccatatcatacctaaccggcccgtacctgtgcggaaaagccatggtccgtcggttacacggttgggcaatactttgtcctccatcttttcgcggctccagggagagtcactggcacggaaaagaatctttcctttgccgatggaaccgcttaaatcgggctttaattcgatcttttccatcgtaccgttccagttttgcagccattcgtggcaatagatcatgtaaggtttgccgtcactgtccacccagaatgtgccatcaagggtaggcatattcgcgggtaggtaagtgggatctttcataggtttataagggccatccggtttatcactgaccaggatgtggctggcacgacgggggatgacatttccttttacggtatcaatcttgatggcgttattcgtaaaagtggcgaaattgtaatattttccgttgtattcatgcagttcggctgcccaaatttcgggtttagggcccatccaggagtcaggatcagtttcagctacacgataagggccttcccaacgggcaaggtctttgcttttccagaggaggccgccagtaccggtcatgtaataagtggaggttttcttatcggccagtatgcaagggtcactcaggtggatggaatcaagagggatgttggtacggaaacggtttgggaccttctgctgggcagatacaaggacagaacacaaggagaataaaaggagtaatagttctcttttcttcatgctataataataatgagtataataaagagtatctcaattcccctcctcccaggaggaggggtaccctttagggtggggtggcaggaaagacaaaatacctttgactcatactaaataggtattttattatctcacctaccacctcccccttcgggtactcctcctcccaggaggaggagaattgagatagatttacttattcaatttctataccgtgttgtaccggagtaagaatgaacgtaaattcatagtcaccataaggcaactgatattgtggcaacggccatgcgccccaactgttcacacatcctaagcccatctgagccttgtcgatgcagagatttgtcaggttagcttctttcacttcaggagagtgattctgggctttctcccaaccatcgtccaaagattcgatagtatagtgcagggctgatgcagagaacggagcatcagctacaatctgcaaaccgcgtccggcatcattcagttgcttccaccagcggatatcagtcttcgtacctgtttcctgcggacggatataagaatagaattgttcatctacgctctggcgatacaatcccagatctgtacaatgattgcggtcactgtagttctctatcgggccacggccatagtattctacagtttcaaaagtcttgggcatctgcatctgcataccgaaacggaacatatgagatactttagcctgcggatcggcagtcatcttctgagccacttttacagcacccttgttattgattacataagtaagatccagtttggcagaaacattcttcatttcgtattctgcacgtaccactgtctggttgtctacggtttcccatttgaaggaagtcagcttcagacccgggttcttccaagcagcgaatttctgttgcaaacctgcaccgaaatcattgtctgtaggtgcacgccagaagttaggtgccagttcggcatcttcgttcatcaattccgtgcctgctacgttgtagcgattcagataaccggtatgtttattgaattccagacggaagttatcaccgttgatgatcagataacgccaatcgttttcctgaatttgaggagcaacggtgggggtattcacaacttccacattcttcaggtccatggcaggagccttgtaggggttcagtacaagttggtctttggctacggcatatccggcagggagcaagccttcgcggttcttcaggcgataagttacattcagcaaccattctttgcattcgcaggttttgccgatgttcaatttcactttggcagtctgctgcggagctacattgaggtcttctacacgaccggtacgaattactttaccgttagcaagcaattgccaatccagatagtaagcggaaaggttacggaagaagttttcgttgtacacgttcacttcgccgttcttcaggtcagcgggagttgtccagatgttctgataatagtaacccacttcgtacatgtgcggattgggaatacggtcggggctgatcagaccattatcacagaagttcttgtccgaaccgtcgtaacggttgaagtcaccgccataagcgtagatagttacaccgtctttacctttccaacgaacggactggtcaacgaagtcccagataaaaccgccttgcaggttggggtatttacggatcagatcccaatattctttgaaaccaccttgtgagttacccatagcgtgggcatattcacactgaataagaggtttcttggcatctgtacgttggccatatttttccatgtgcttgtaatcagcatacatagggcagtcgatatcggtaaattcatttccgtgtgcctgttcgtattgtacggcacggctggcatcttcgttcttgatccaacggtagcaagcttcaaaattaggtccgaagccggcttcgttacccaatgaccagaaaatgatactgggatggttgaaaccgcgttgtacgttgcgctggttacgttccatgtgagccttggcatagtcggtgcgtttagccagtgtcttttcacgataacccataccgtgtgattcgatattagcctcagccactacatacagaccatattggtcgcaaaggtcgtaccacaggttatcatcaggatagtgacaggtacgcacagcgttgatattgaatttcttcatgacctgaatatcctggatcatgcgttcgggagatacgacataaccaccatccggatcaatttcatgacggtcggcacctttgaagagaacggcctggccgtttactaatatctggtcacctttcaattcgatcttacggaagcctacctttacggggattacttcgttgctgccttgcaaagtggcacgcagtgtatagaggtaaggagtttcggctgtccatttatgcggattttccacattcatcagaatggtaccgctacctttggctgtttccgtagctactgccttgccggcagcatcaagtaattccaggttcacattaccgctgcctttcaggtcgagcgtcacacgcagggaaccatttttgtatgcctcgtccagatccggagtgatacggatatcctggatacgtttcttgttgcgggcatagaggtaacaatcacgtcccacaccactgtaacggaagaagtcctggtcttccaggtaggttccatcacaccagcggaatacctggaaagcgatgagattcgtttgtccgggcttcaaataaggagtcaggtcgaattcggcttcgagcttgctatcttcgctatagcctacataacggccattcacccaaagatacatgttggaggttacagaaccgaaatgagcgataatgtctttccctttccagtcggcgggaacaatgatttcacgacggtaagaacctacatgattgttctctgtaggaacttcaggagggttgttctggaactgattacgccaggcataaccggtgtttacataaataggatcgccataaccgttcaattcccacacagcgggaacttgcagattattccagccacggtcattgaaacctactttccagaagtcggtaggacgctggtcggcattgcgtacccaagagaatttccaggtaccattcaaagtcatgtaattagtagattgggctttcttgccttgcatggcggcatctgccgattcataggcaaagtaattagtgtgcatgggagcacggttcacggcattgatttccggatcaagccactctttaaaggactgtgcatttgcagtcagagccagagctgcaaagagtccggtaataagatgtttcttcatggatataaaattattatgtttgtagcggtacgaagaatattttctgcataccgctacaaagatagggtgaatgaactttttttagggtgaataatagttcaaaaaagggggaatagagttcaaagagctacaagcctactgtaatctatacactccaaacgaacgtggttcaagtttcagtttcagagattgcccttctacctgcaccggacgtacacgaggaacaatcgcttcctggtccagcgtatttacagtgcgccaattgtcgttctgtaagtaagtgcaggaaccggcaaccaactgacgtttcttcaaaccattgaaatcgatctgaacatcggcaagcttactgcttgcattcaccagtttcagaatgatttctccggtaggtgcattcagtgcagctgttgcatagaggctgtcctgccccgctactgctttgccatccatcttcaggctgagcacatcggtaccggcattcatgccgtacatctgctgaacgtaatagttcggtgtgcgcatcatgcgcaggttatcgaaccagatcaagtccggattccactgccaagcgtctacgtgagcaaacaacggcgcataagtagccagatgaacaacatccgcattccgttccaatcccgtcataaaggcagcttcggaaagggcggcgaggaagttgttatccttcttcgtggaatgatcgtgtgaagcatattctccggcgaaaaccttcggacctttacggtcgtaattgtcatagcgtgacgcattgccaaggaaccaatcaggattcatgtagtagtgttcgtccaccagatctacaccgatacgcttcatttcgggccagagataatcgaatttatcaccgctggcactcgggccggagctacctacaaccttcacattagggtatttcgcacggatggcttttgtgaaagcttcgaggcgttctacataaaccttgtcccactgttcattgccgataccgatcatcttcagattgaagggttcgggatgtcccatatcggcacgcacctttccccacttggaagtaacagggccgttggcaaattcaatcaggtcgagtgcatcctgtatatacgggtctagttcatccatcgggaccacttcgttgctttcgtactggcaggagagcccgcagctgattaccggaagaggttctgcaccgaggtcttcgctcaacaggaagtattcgaagtaaccaagtcccaaagtctggaaatagtcagggaaggctttatgcttgaaggtgtagttccagcggttttcattcagagggcggttttcaacaggacctacggaattcttccactggtaacgggtttcaagactgttaccctcgatgatacaaccaccggggaaacggaatacgccggggttaaggtcataaagggcttgtgcaaggtcggcacgcaggccattctcacgtcctttccaagtattcacagggaacagggagatatgatccatatttaccgtaccctgtgtttcgaggacgatacgcaggcgggcatgagcgtctgtgaaaggagatttcagcaccgccgtcagcttttgccagttattgccgctgacttcgatttctttcttcaacagattctgtgcattggagtcgacgagctcgatggagagcttcatcggcttcgcatccggcgtgcgggcataaacggagaaacggtattcttcgccttgcttcacaccgatgccacggtaaccttcattatccagtccggcacgcagcagacgaccgtcgttcactacacgtacatagtgaggattgcggtcaaaacaaggatttgcatcctgaacggttacattaccgaaaggcacccaacccacgaaaggttgtgggaattcaaaagaacggttctttaccagttcggcatacagaccgccatcggcaccgaagttgatatcttcgaaaaagatgccatacatttcaggttgtatctttgccgtcggtttagaaacgtcgacggtcatcacatgttgctgcgcctgcacactcagtgctccaacaatcatcaggaaaaataaaaatcttttcatattatattcatttctaacgattcaattctattcgataaatacatctttcatctcctctctgtacagaagatataactacagcctccacctgatgctcacacaccacagaaaacatacgttctgcaaatccctcagagcaatagcacatggcaggaagaagcttatccgtatctttatttattagcgggcatacacaaaaaggtttcgattcatcagcaataagcaccttttcattttcttcaaagtgacatttccaaccccactctttctctatgaaagaaataaagtcttttaatcgccctttaaacggtgccagcatagcctccgctttcatttgattaaaatgagctatcgaagctgactttatcaataaacgaagttgtgattcttcttgagttgcactcagatttgttagaagctctgcaatccatacttttgccatatcattcatatcagaagcctcttctgtatcttccaaagccggagtattcgctccgagaaggcgtccaaacccacagaagcataaagcacctaaacaggaggttttcacaaaacgccttctcgatgtttccatatcagatattattattttttcttttcaatattctgatggatacgtatcactgtaaacgaataagcaggcattgagtaagaaaagtcatttccttctaccttgaaatcagaagaagcgggtttagctcctctgtctttcggatcacctgtcaatatcgtttttgtagccgaaggatttaccaaagtagctccgtccaacttcatctgggaagaaacttccaccggaagcatattcactaacttcacgatataatctccggtattaacgtctttcacgaccgatactccgacacgtttcttcacggcatcccagccattattcagttttaccgtagaagacaggtattcggtacctgcattctgaccatacatctgttgagtatagtagcctactgtgggtcttacttccgtattattgaaatagatcaagtccggattccattgtgtatgaccatctttagccaacaatggagcataggaagtcatttctaccacatcaccgttacgttctacggcagtcagatagagagcttcggcaagcgcagtttctacattattggggcgtcccggcaagtgggcggcgtattcgcccaagtaaactttcgctttactacggtcgtaatgatcgtaatattcctggttgtggatcatccaacccggttctacatagtaatgctcgtctaccatcggtacacccaattcggtagcaaggtcccaacctacttcataatccgtaccttcgtagaacggaccggtagtaccaatcacggtaacttcaggatgttttgcttttacggcatcgaatatcatcttaaagcgttccacgaagacaggtgtaatcatgtcctcattaccgataccgatgaacttcagattgaacggtttcggatgtccggcttccgcacgcttcttaccccacacggttttgcgggcatctccgttggcatattctatcaggtcgagaacatcttggatgtattgatccatttcttccatcggcacgccaccctgctgccccatgcaagtcagttcatccttggaatggtgagcgcaggtaccagagttctgacaaggtacaccggctgcaagcacaggtacgggctccgcacccatatcttcacagaacaagaagtattcgtggtatcccagaccgcgtgtctgatggtatccccaaagattacgaagcggcttgcgggcttccaacggaccgatagagcctttccaatcataaatattatctattccatcgccatgagccacacaaccaccggggaaacgtacgaaacggggatgcaggtcggcaagcgtttgtgccaaatcggcacgaagtccattcttacgacctttgaaggtcttttgcgggaagagagaaatcatatccagcgcatacttgctgacagcctggggaacaatggacagagatgcagccgccgcatcgcttgtggctgtcaggactgctttctgttgtttccaatctttagatgttacatttacggcagtttgtcctataatagttccatctttatcaaccaagttcacaagtaccttacctcctttaccctcaagtactttaccaaagagtgagaaatcatatttctcgcctttcttcaaggctatgccatcgaaaccagcattcaccaatgcagtttgttcagctgcattcacatcgaagacggcataatggggattattaggatgaataggattctctgttgcaatgctcaatgtagcatcactgccctgaacactccaggaatgagtactattccagttctgatcgttaccacggtcggtcggggtatattcaaagtcgcgattctgaaccagttcggcatacaagccgccgtcagctccatagttgatatcctcaaagaaaacaccaatcagatgcttgctgatttctttcgcctgacctgcatttacctggatagtagcctctacaggcttgagattggcaaaacgtacagggtcttgctcggtacgttcggcattcagtgactggcggtatttcttatgttcggcatagcggatgatctgctgcacggtagtatagggaacttcctgcacccagccttcttcttcggaaccattcaccaataccttcttctgagtggtggggtacacatctttgggttcatacttgctacgttcttcgggagagaaataactctgtgcttcccacttctgcaagtcgggagaggttacataggcaagtgcctgaccagtattcgtagcttcccagatgcaatgccatttgccatcggcacgggtttgcatcaaatggggcttgaacatagtctttgcccgtccccacggaccgaagtcggaattcacataggcaaatccatcggccacgctaaaccacttctctccgtcgggactccaggcaaacttcaggccgctgcgtccgtcacggttcgaataggaaaagaggtacacctgattcggttcattcgtcacgccctccacctttgcctgcacagggaagacaaaagacagaagtaaacatacacttaaaaatctaatcaatctgttcatggtattatttatcgggttatttgtttttccaatactttctcagcttctcagcctctttcttagtgatgtggattactgctccatgtttcggtgaagaaaagttagtcgccttcatcacgccctcgttgaaacgtcccaaatctttgaagttcacaaagtcagtggtttcactgaaaccgaaattatgaggattgataccatagatgtcatacattaccacccatttgtcttcgccaatgcgcttccacatgttaggagcttcgcaggctttcggttccgggtctacccattccggcagataagtatatccacggttgatatatttcgaaacagcttgtttgatacccggtgttccgtcgtgagctacgtagaacatatgatacttatcacctactttcgtaatatcggcatcgatagctgatttggtagcatcaggatattggaacaataagcggggttctgtttccagaccgtcgaagtcttcgtttacataagcatagtacaacatattccgtgcattgcccatgcgcatggtgaagtagatcattattctgcctgcatgttcatcgtagaccagttcaggtgcccaggcacaaccgatctcatcatatccggggaaagtcttgtcaatacgaaccacatggtgtgtccagtttacaaggtcttttgatttcatcaggacaaaaccacggttgttgccccagccatatttggctccgtcacgctcccactcggtgttgcgcagacctttctgttgggcaaagatatgcaggtcggtcatggcaatgtagaaagtaccatccggtgcacgataaatatgcgggtcacggatacctttctgttcggcaatcgtatcaccggcgataatgggctgaccgttatttacatccgtaaatgtatatccgtcatcgctgactgcgaaatataaactatgtgtatcgtctttgaaataggtaaacagataggctcccatttccttctcattcgttttccagtcctgaaccagtacggcgccaccttgcggttggagggtcagttgaagtttgccatcagctttcagtttcagagtttgcaactggggttgcagttctttatcatcattatagaatgagagagtctctcctgccagcataggtaattcaagtttcaatttcagtacttcttttgtaccgttaacggcagctacataccattgcttgccgtgacgacgtgcaacaactgcatattttccgggataaccatcaataaaacgcgtttcatcccacgtagtaggcacttgtttcataaagtccaggcaaacttgcggggcatctgtcagattgttaggtgccaaagcataattctgaataggattctggaacaacacagcggttgacaactggaatacatccgtcgtgcgacgggtagttccaccattgttcccccggttcaaacgcttgttcaggaacgtaccgccaaattccatacagcctaccgaattacggataaaaggatgcagacaggcattgaaagcctcttcgtcacagtagtgctggttgaaaatcagattctcggaagccagtaccgcttcgctgcctacatagttgggatacatccgctcccatccgcgaggcactgtacagccgtggaagattaccatcagaccatgatcgtcagcatcactcagaataccttcgtacaaacgcatggtttcctgtttatctccaccgaaaaagtcgactttgatacctttcacaccctgctcctgaagccatttcatttcgcgcttgcggataatcggatcatccatcttattgacgggaccttgctcgatatcattccagtagccgcttgaactgtaccacaagaatacatccactcctttaccttgtgcatagtcgatgagggattccatacgcttatggccgatcttcgtatcccaccagttatcaatcaatacatattcatagcccattgcagcagccaaatcaacataacgcacctggtcatcataattgatactgccgtcctgccagagtatccagctccaggtaccacgtcccatctgataatcatgttccgtctcatacaacggttccacaacatcccagataacagtggtttctacaataggtttcaatgtttcacctaccgtaatcgtacgccaaggtgtagaacccggtaaagcgaaagcgggggcaactgttccgttaccattattctcttcagccatcgggaaagctaccgtatacagatttccttctgtcacatcgctcaggcgcgaaccgcaatagcggctgtctactcccgtctcactgacaagtacccagccattatctcctacgcggaacaggcaggggaaagtatatccgtgtccgtattgtgaacggacattcatcggggcatctgccttatattcttcttcataactcggttttgtccgcttccagcctatcatggcgtcactttgcggacacataaaggtagtagtctgttcaggaaaacggaagccggttgcctcactgttcacaacaaggcttccccgttcgccctggcggggcaacgtatagcggaaagcaacgtcattattgctcacacggaagattacgtccatcttctgcccttttgcattggcaaaagcacataccaattcattggcctgatagtgtatcttggaagctttgatacgcgattgcgtgtaaacagtatcaattttcctttctttatgcccggtcagtttcattgctttcgcgaaatctcccacattggtctccagacccaacggagatgattccaacatctgttttccgttataagtgagagaatacgatgcttccttcccttccgggcacgaaactgttagttgtaatttaccgtcaggtccgctgacggttacattctgtgctgtcagcggcaaggctaccgccatacataaaaaagctaatcccttcagtttgtttctcatgatcaaataatgtttctctgatattttaatagtcatataattaaagggttggcactaccggtttaatggttccgtccgcattgaattccatgcgatcaatgcacacctcgcggtgcacgcccggaccatctttcaggaagttcttattaatacgatggtaaacgatataccactcatccgtacccggaatttgtagcactgcattgtgtgcaggaccgtagatttgtttctccggattctgaatcagtacaatcggatctttagctacctcgataggtcccagcggcgatttagatgtaccgtaagccacatgatagttgggtgaaccggtgtcatctaccgaccacataaaataataaagtccgttacggtaaaatacataaggagcttcgcggaatgcataatcctgcaaggttcctccttcgggagtcatcaccgtaagtgttttcttcttgatggagatcatatctttattcagttcggcgccggccatgtagccattaccccaatatagatagggtttaccggatacgggatcggtaaagacatccacgtctatctgctgtccgtgtcctacaggggagtctgtaatgatgggctgtcccagatcggtaaacggtccggtaggtgagtcggccattgctacgccgatttgctttcctccgcctttggcaggattgccgctataataaaagaagtacttgtattctcccttgatgagtttttcttcaatacacggtgcccaggcattcccattcgcccaaggtacctgttcggatttcaaatccagcataacgccttcatagttccagttcttcaggtcggttgaagaaaaaacagtgaagtaccatccgccccagccgggttgtccgtctgttgtggaatagatataatatttctttgtcttgtttgagtataagatttcagggtcggcatgaaatccgggcagtacagggttattcggtattgcacccaattcggcaggcttgccccatttatccgtgatacggatcaattcatcgcgcgtgataggaataatcgttccgtgacggggatggaagttcatcttcacttcactgtctatcactttgaagtttttcagatcggtagtttccgtaaactgatatttgcctttcatgtatacatcatacattaatatatacttatcctgatttatcagtttaaatgtaccggctccttctacagcgtcctttgtctgctgcttgtagtccggttcttcttcccattgaccggaagtcagtgaacgggtggtcgccactttaatgccgtttccatgtccctctgtcttatagaacaggtggaaaacaccgtctttatagacaatatccccgtcgatacatgatttcttattctccggaatgaagagtggcttcggttcaccaatcagatctgtaaagtcgtcgttggcatatgcatagtagatgatatcggctccaccggcatactgcatagaccagtacaccatatattttccggcttcaggatcaaaaaccgtctgcggtgcccaaacacgtttcagcttttcctgtcctttataacgtttctgcatgttgatgatggaatgcgtccagtttacaaggtcattggacttcagcagcaccattgcacggttcgaatcccaaccattgtcagataccatatctgtcaccaccatataaaaggtatgaccgtcctggcttctcaggatatgcgggtcgcgcacaccaccggtcgaactgattacttttgaatcaagaacgggcttaccgtcattcagtgcccaatatgtatatccgtccatacttacggcataacatacagcttcttcactgatgtggttacctgtaaagtaggtaaacaaataagccacataatctttttcaacgataggatgttgttgggaaaaagaaggcaatgtcattgccaacattaaactaatagcaactgcaaaatgtctcatagtgttcctcataaaattcacgttagttattgggtgtcaaaaatacacataaaaaaagggaatatactaccacgaatcatgcaaaaagggaataattttgtgtcatttcattaaaaaacaaagatttacccaggttattaaaccaaaatggagcttgccaatgccgacaaactccatttcgtatcttctggaaaaaatagaataatcaattcaggaatcgtaccatttcgcaagccgccagtaagaaagcccctactccaaagttagctgttgaattggcatctaccacttgtcccggaatggccttctcaccgataggctgcacatagccgatacgtccatctggctgcaaagcaacagttgtcaggtacttccaggctttttctactacaggctgataagtagccttatccaaaaagccattattcataccccacagcagaccataagtaaagaaagcagtgccactggtttccggtccgggtgcatgttccggatcaagcaaactccgtgtccagtatccttccggctgctgacaggctgccacagcttttgccatcgcgcggtaacggtctatatattcctgacggtatttatccgtttcaggcaaatctttcaggactttagccaaagcagctaaaacccatccatctccacgagcccaaaaatctttcttaccattcacacttttatgtttaggatagagatattttccgtcacgataataaagcgcatcttccggatcgtacatcagactgtcggcaaatgcccagtactcatgcagtttctccagataaagcggattgccggtaatcttatatagtttagtcatcacaggcatcaccatgtaaagaccgtcagcccaccaccaataatcattcttatccgtactcatctgatattccatcacttcgcgggcacgagctattttttgagtatccggttctatattgtataaatcggcatacgtctgaaagcaaatctggtaatcaccaaaaagcacataatcgtcactctcgccatagctgtatttccattcagctttattatccgacttagcacctttccattgattatgttcagcccaagccttggagtagttcatgaaatcggagtcaccggtcagaaagaacgcttccatgttaccactatggtaagctgcattgtcccagaaagagcgtccgtgctcaggattctgagtttgccagtagttattcactttataaataatatccacaatctctttggcctcatcctttggggatgcacaagcggacattccactccagcaaaaagccccaatcaggatgtttactaaatacttattcatactcttgctattctttatctatttactatactaattgtctgagcgtttaatgtttcattctgtttctctctattgaaacaatatttccaacatggcggaaccaatgtttcatcgtgctgaaacgattatttctccttggtgaaaatagagtttcatcacgttgaaaacagaatcatcttatgtaaggctttcaatcgcccttaggctttacaacttccagcacatataccggttgaggggcaaactctaccctacgttctccatcaccttgtttggtgtgctgcacaaagagatgaagacgacatttttgcttccacaattccgtatcgtgagacggttcccaagcatctaccgggaagttggtcagatcggtaaacgtccacttacctactcccacagccgcagcgtgtgccatcgatacccggcttccccgttcttcatcacggaaaatataaaatatctcgccaccatccaccacgatacgcgggcgggcaatagggatcatctttgtaccgccacctttcagagaaaaaggagtatggcggttcgaaacctggcgattatgccacatctgtccgtcatgccacacaatacggtattgcggcacttcgctgtcaggatcacgccaatacgtggcaatgtacgggttaccgcttgcatcagcactcatactggtctgattgatcagttctgagttttgcgggatgcggcaggcatattccgcattattgtaccggataggtaaatcgtatttcttgccatttgctttgtaccaggtcacaccattatcgtaagaacgggcataacaaagatcatgatttgtctccacgtgccacgtttcgcgccacacccaagataggtgaatcgtgccttgttcgtccacatagagttgccagtaggcattccgttggtcttcaccatctatcagtacatcttgtacacgattccacttcttctcctttacagaataatggttcatcaccagattcccccgtccggaagagccggagcgataaacaaacagcaaatctcccccattcagcggatagaactccggataagtcacattaccttcatccacaccggtcatcggttccttatctccaagttccagcgtataagggacggtgctacggcaataattcagtttatgcccgtgatggtcgaatgagagatgcaaatagccatcgccatccaacatcatactgattatgttatgggcatctttcacatttcccttgtattgtgtccgcttcagtgtccattggtcagagtccaacttccgtttaccgagcaccagatagccgtcgccgtcatagtaactgatatactgttcgtctccctgcgtcacaagtgaattgtttctgaagacagtagtgttgactgatgtctggctatacccattccccacttccacgagccgggactgttgtgcccggagcgtggtaagtgtcgagagaatcagaaagaaaaagagaatgtatctgttcatgataacttatttctaataggcgtgatctttcgggaagtcttctccaccccacgctttctttgatgtccacggttgcggggcatctgtccaaaaaggagcgtcagcgggcaatcctaacggaaggaaagcaagtgaggccaaatataggctgccattattggtataccaatccgatatattaggttgggaaccgttgaaacctaatgtcagatagccttccgcattgaagttgcgattatcaccgaacatacgctgaatgacagcggtcattgccgcacgtacctgtccggcaggcaactctttgggtaaccagccacgcaatgacagcaaggcaagcggttgcagtacgccggtacggtaagtaatcgagcggccaaataccgggaaagtgccttcgggagaaacaaaacgttccaatatcatgccgaaacgctgcatacgcttcaaggcattcggaaagtttccgcctttcacattccagatattctgctttccgccatttgtcatcacttcaaggcattccacatacatgggatgaatcacaaaactattgtaataatcgaaggcgaaatcctctccgtcactgtaccagccatctcctacataccattcatcgactttacgcaaagctgaagtgatacggtaataatccgtctgggcacccgcctttttcaggaagcactcaacagttgaagagaataataaccaattcgtatagggtggatccacccgacgcagttgctggaattcagcaatataacgctgttttgtcaaatcatccaatggaacccacaaagcgtcatatccgcgcaaaaaactttcagctatataggcggcatccaccaagggttgtccctctttccgccacaacagataatctttactttccggatctacggattgagcatagctctttaatgcccattcacgcaattgtttgcgttgttttccttctgccgtatcatcatcaggcagtgacagccacggagccagtccggccatcaaccgtccgaagcattccatataagtcacccgcttatcacgaccgtcccatgtagggctcaactccaccagcatattttcctgcaacttgccttcgctcatattactgagtacaggcgctgccatctggtacagaactcccgcccaaagttcacgatcagactttactttttccgttttcttttttgccgaaacattgaggggaaccagcaacgctacaatcaacagtagccacaaatatttccacgttttcatgatattcaattataagttgtttttcatcgttgcaaatatattcgttttcagataaaccgaactgctaaaattatttcaaaaagggtacataatcgaccattctataggaaaatggccgattttcactccacactcaccacttatccacccactctataaatggaattcctttcccattaaaacgaacaggcagccaaatatacctagaatccgacaagcttttcggacgccacacatctgccataaacatgtatccaccatcctttagtggcagtatgtaggtactttgtcctccaaaagtaattttcgcatctttacctacacaaggattgggtaattgcgaccattcccccagaattgaagaagcagtcatcaaacgggcttcattcggctcccatcctgtacatcccgaagctatcatccaataagttccatccttcttaaatatagccggcgcttcattatgtcctccgggaaatatacgaatgtactttccggtatggctcagataatcatcagacaattctgcgatatggagtgtcaggttctcttccgaggaataaatatggtaggctgtgccgtcatcatccacaaacaaagtcatatcacgggacatctgtccgtcaccttccaggtcacgtttcacaaacattcccttattgacagcctcacgccactccggagtccaccattcataatcttccggattccaagtaagcttctgctcctcctgtgtcatatttagcggatagacaccgggattcacgcgccctgaacggataaaccgataaggtcccgccggggtgtcgcttactgcaactccggcacgggaaggcccatatcctcttcctttaagttccaaatggaaccacattacgtattttcctgttttctgattataaataactttaggacgttctatgatacatcctttctctatatcacttcctgcttcgtcagatacagccaaagctacaccttcgtacttccagttacgcaaatcggttgatgaataacatgtcactcccacctgtgttgtaaaaccggaagaaggccggtgctctccaaaccagtagtatttcccgttgttgaagaggataccgccgccatgggcgttaataacattaccgtctgtatctttccagacttcaccggaaacaatatctttcgtaccaatcgaagtattttgtgcggaaagaatggtttgaaagaagaaagaaaggaataaaaaatatcctgttatattcaaatgcttactcatatcttcatatcttaaaaaagaaaagaggttgtgtcaaaatcactttgtgtattccgaacgaatgacgattcgcctctacaagcacagtactttagacccaacctctttatttaagaactaaacctatagaaatcctccaacctggttattcactcttatcctcatcagcaacagcttcttcccaagtttcccacatcggtacactagcatcatatccatcgtaaccgtaattttgagctagctgtcctttattattcgcagtaatagcactattcggaaccggccagaaaaggttacgcttatccatataataattcagagtcttgccattggaaacgatgtcacctttattatacaaagaataatgaatgatacgttgataccagtagcttccgccaacattatccgtaccctgttgtttatcccaattgtctttactataagtatttccccattcatcaggtttgccgctcaacgccagacaaagagatacgcgggtcaattctacattgcgccattcttccagataaagttcacgagcgcgttcgttcatgatatcaccaatagtcacggttccaactgcataaagttgtgaacatttagcacgtttacgtacttcatttacatctgatgtagcatccttaccttgataatacttagcttcagcacgcagcagataagtttcagccaaacgatacagataccagtttgcattagcaccggaaccggctgcaccttgaaagtcattggcacccatattagcttcattgcgcacatcctccaaatagatcttgtagtgagggaaatcaaaccaatcacgaattgtatcattacagagtaaagctcctttatgagttgtgataacaggtttaccatccttatctaccccccaaacatcttcaggtgaatagagcataaaattctgaccataatatttagaatccttgttattgtaagtcaagtcctccatatttacccagtttccaacttttgagttatggcggagatcttccttatcttccacaccgttcactacccaaagtccatgttgagcaaaatgagtagcacgaacagtggcaatgccacgaccaaaagcacgtgtaaagtcagtagtagcttcatatttgccattattacgtgcataacgttcaccagctgttttactatcaggtgttttcaggttaccgtcactccagaatggaccgaaaatacgcatagatagaaagttcacaaatgattcgtccgtacagttaggcattcccatgatgacctctttattcgcagcgatcatcttgttttcagggcgatgcaagtcccagatcacgttacgggtaatcttccaggtattcggttcaccaccatcatttgcattaccaaagctctctgtcatcagtgataatcctgactgatcaatcaaaatgtcagcttgcttctcagccttttcaaactggcccgttgccaaataacatttgataagcagctggcgacatgcctctttgttcaccataccaatgtaacgggtatcattctgcacaggcacccactccacagctttctccatatcctgggtaatcatatccagaatttcttctttcttggtagaccgatagtttcgcttaggtacttccagtgtctttgttaccaaaggaatatcaccaaactgcatcactaggttcaaataacggtaagcacgatggaaataagcacgccctttataggcattttttgtttcctcactcaacgcagtcactttatctataaaggacaatatagtgttggcatgcttaatacccgtgaaaccttcattccagaagtacatgattcggttgtcatcaccgttgttcaaaccactggtaggttgcagttgattggcaaaattaccatataccccccctgtaccatcagttttaccatacagagaaagttcagaaaatagatattccgtaccaagaggtatgcttatattacagtcaccactactatagtggaatgcccaagtgcgaagatgacggtcagccatagccaatacggcctccaaacctgattcagtagcaaatgttgtctcaggttcataaaacgacagaggatccggtttcaaaaagttgtcagtgcatgcactgaatactgctattcctgtaaggaacaatacccccttagagagcttattcttaatataattattcattgtttcaacagtttaaagagttaagtttaatccgaatgtaaaggtacgagtagccaagccaccggtttccgggtctgcatattcccagtctgccgcccaagtcgctacgttacgaacagtaccaaagagttttacgcgttccaactgtatcttcttcgtccacgcttgtggcaaggtgtaagccacagaaatattgtccagacggatgaaggaacgattgtgcaacttctgtacacccttagcaccattcggaccataggcatcgagacgtgcatactcattagtcggattttcaggtgtccagtatctcttcttgaaagtattgctgttataagtaatcaatgaaccgccattatcttgattcagataataaccttccagactcttatgtcccatataggaatacatgctgaaagaaatattaaggtccttccagagagtgaactcattacggaacgaccagtggataggcggatttttcttacccaggaacactttatccttctcattgtaaaccggtgtgccatcttctttatcgtcagcagtatagtggttcactactttcggatcacccgggcgttgtcctaccttagcagcttctgctgcctcatcagcctgccagataccatccatctcataatcccagatagtaccaatggattgtccaataaaccaaccgttgcttgtgtcgtccatctctttgcgaccaattacttctccagcttcattgagcacgtcttcatattcataataaagatgcttgatttcattcttatagatggagaagcttaaagtagagcgccattcgaaatcccgattctgaatattcagggtattcaatgaaagttcgaaacctctgttctgcacttcacccaaattggtagtaatgcttccaaatccggtaaatcccggcagacgttgtcccataatcatatcatgcgtcttcataatataatattcagcactacccgtgatccgatcattcatgaatccgaagtccaaaccaaaatttaaagcttccgttttctcccattgcagattcggattagacaaacggtccatacccaaatacttaacatctactgtaccgccattagcaaccaaataccccattgtagcccctgctccggcccccagattggcaagagcaatataagggtctttcaacgaacggttaccattcttaccccaagagacacgcaatttaccggtactcatcggctcccaattaaagaacttttcattagtaaaattccatgcagcagatatagaagggaaggtagcccatggattgttagcaccgaaagcgcaataaccatcacgacgaaccgtaccagtaatcatatagcgatcatcgtaagaatagaacagacgtgccatataagcagcagccgtttcgtgcgtatcatttgaagaaaaactactcagcgtcttgctaccattgctggtattatgaaatcccaaggcatccgagggtaatatcttgcgtgcgttaattttatcctgccaaaaacggcgttcttctgcctcctgcaccaaagtaagaataaagtgatgcttttgagccaatgtataatcccatgtaatagtattattcaaagaccaatcaaaacgtttactttgttcacgatttactccctggctatccggattagaatcaggtttggcagctgacataaagtagcgatcatagaaaaattgataacgaggagctatattgaaatcataagtgattccaaaaggcaattttactttggcattgaaaatagtattcaacacagtatagcccttctccagatccagatactgacgctcaaagtcatagttgtagccccacttcttattggaacccatcggatattggcaatagctaccatcttcgttacgataagtagagtaaggactgtttcgcaacatattggcatcccagtaatccgtaccaagatttacagaaatatcaccgtcactacgatcctgaaaattaacgttcgttcctatttccaaccagtcggttactttgccattcaccttcaaattggcacggatagcattgtaatcattgcctctcacggctccctcattctttaggtaaccgatagacatataataattcatccgatcaccggctccggaaatactcgctgtataatcctgattgatacctgtccggaaagtacgatcgtaccagtcgtacgtgtttccggccagatagttagctaaaacaccatcttccagtcctaaacgctttgcataaatactggcgtccgattctccactctcatttgaagtgaacgctctccattggtcaacggagataccataccgacctaaattcgcaggattatcataataaccggcagcacggttatatatatattcttgtaagggtttgccatcagagcctattatatctttaccgttctcatccttcttgtttttccattgtccggctgcatacgctccataaacaccggtaaaagggtcagtggcataagtatctttcttataccaatcttcacgatatctcatatagccgttggcatcaaaaacatcacgatattcactctttgtattgataccaagagtagcagtaaaattgatagtcggcttacctgatttaccttttttagtcgtaataataataacaccattggcagctttagcaccataaacagcagcagaagaggcgtctttcaatacatcaatctgaccaatgtcattcggattaatttcagaaagttcaccataaaactgcataccatcaaggataatcaacggatcattatgtccaccatccgtatatacagaacgctgaccacgaatctgcatagaaccaccgcccttagcagaagcatcgtaaccgacattcaaacccggtgtaccacgcaatacatcttgcacagtcttgggagcctcattcgctaatttatctggacgaatctggataacagaaccggtcaggtcttttttacgcatttgaccataacccacaaccacaacctcatccagcatttcactatcctcctgtagtgtcactttcacattcctttgcccttttacaggaatttccaccattttataaccaataaaactcactaccaacgtagcattcgggtttactttaatggagaagttaccatcaatatcggtaattgttccattagaagctacgcctttctcaacaatactggcaccaatcacaggacccatcgtgtcctctactttacccgttactgtaacttgggaattttgagcgcccagatatgggacgttcatcattagagtcatacagaccattaaggtaaaaagtaccttgcttagtcctgctcttgaggaaatctttcgtttttccatcgtataatttttaagattaaaaaaataatataagttctctatcttcaatccggaaactgcatgcctggctcccgaactgcatggcaaatgtatggaaaggaaatacattgcggcattacaaaaatgccagagatgttgaagaatggtgcatgaaacattctcccatcaataatgcaccattcttcaacaatctgactatttatctattgtcagtatatcctcaatcagttgttccaggtcactgacagagtttgaatttcctccgtaggttcttccccggctacgtccataaccagaacgtgcacccggatttatctgtccgccaccagtaaaactgccagtcatgacacaaccttcattctccatcgaaatcaactcgacagttggcttcacataagtttcttttttcatatacttgttcattttaaaatttacactttattttatttggaatatatcacagccttctgaccttccacaacatagaaaccgggagcaagaccagtaacaatattcacaccttcctgtaattgtaccgtacgtaccaatactccatccacaccatgaatctgaactatagttaccttaggggaaacaattttcagattgccagcttccgaatacacacgtaatttgccagcatgatccttagtcccattctctaaaccggtaatttcgccatttccaccacctatgctaaagcttttcggcatcgacatcgattctacatccggaagcaagtagcagcggaaaggttcaactgtagctccatcatcatatttaatgaaagcatttccctcagcatttagtctataatgagctctgacaggttgaacaactgcataagttccattaaagctataatcatctgccgtaactttagcaatgcccttagtggctgatacagttacatccgtaccacgaatctctatttccttatctttaatactattttccactccccagcgttcccctggcaaagctatgatatatggtatatcagcttcaattgagcttgcatattcaaagttcatagcctcgtttgttttaccggcaaatctcttcagccagtaatttccggatgcgtcatcatcactaataaaaggattcttggcatcttcaccggcatacaaggttcctgcaaaaggcagtacaagagaactccaaccatttgtaccatcggcatatacatatccggtcaggtcacgtcgatagacagcagatgtagccgtaaaactgacaggcgaataaaaaggctgtttatccgtaagcaataaactggtacaagaataagtgtttgccgcattctttacgacaacgttgttctgtccctccggaaggttaataccatcagcatcgtccactacggcaatagcattgccggttagtatgtcagccagaccactaccatccttatatacttctactgtttctccggtactattgcctttataaacagaaacagttaccatagcatcagccagttttgccacttccaagtcagacaatgctttattatatatcctaaaatcatcatagatatggtcgcaatacgcatcgctcgaccactgagatttacccaaatagttttgtgtagttattcccatatccttaggagaaattttatccgcattttcgcctgtacccacacagataccattcagataaaacttaaccgaagtacccgcctgtgtcatagcaaaatgtatccattccttagtttttatcgtacaaggaatggtgatatcgaatgtaccagctccgcatgttattttatagcgtatcttagttgtagccggtgccagcatcataaatgtgcctgtcccggtgccaaaatcaaacaagcgccctattcctccgttaaagttaatccaggtggtaatggtgaaatcttccaaactgctaagtgcaccatcctgcaattgtatataagaacttttgctcttggtgagtgctactgcgcttcctgttttaccggtagtccattcagcaccattcaccagtgttccatgatatccaccccatgcatcaaaagctgttgttcctgcattttcatcaaacgaaagatatacatgttgcccggcaacaggtatagctgacagtatttcgctttccggaccatcaccggcagtattataggcttgcaccttataataataagtagtaccttcaacaagcccattatccacatagcgcgtagtctcaatagcatctgctatttgttcatatgaagcatccttctcctcggcacgtaataccctatatttagcatcataagcgaaatcccaagttaaagtcaaatgcccgtcccctgctgctatacgcagtccgtttatcgccaaaggaacagccaatgccttcgtacttacggttaaaacatcagaaaccggttctgtagctgctgtactcagcgcataaagcctataataatagggagtattcactgctaaattctcatccatataagttgtaccagtaagtaggtttgctatttccacatattctccgtttgcactttccgcacgttccaatctgtaagaacgagcattatccacagcactccaagtcaattttataattttagaagagagtgcttcaccttgcaagataggtttatcgggtacggcatctctggtcacacttgctgtacgtgaataagaagactgtgtatctttataactcaacgcgatgacacggtaatcaaccttcgatgtgcaatcaatttcttcggtataagaaatcgtacttccatatgtatagaccaaaggattatcaggattcatgtcagttgctgcaataaagacctttacatctgtccattctccaccatccacactcttctgcaatgtgtaattcttacccgtctctccattgtgatcataccaactaatagttatcgacttatagtctttcgacaaagtatagctgggaagaggaggagcaattttccaggtatgggtatactcccgcgcttttgaaaagcccactttcgatttatatgctgcaaagtttttccccgcaggagtcagtttattgtccagcactatagctcttgcatcctgtacccagttatagagtgaatgtcgttcaagatattcacaacgttcaagcccattcagcgcatccagtatccacgtagcttgttttgccgcattttcgggcgacaacggtctggtcactgttttttcatttccatcctcatcataaatgatgttcaaatccgcatctctttgaggtcccgaattagtaggccagttttcagttgtccagttggcaccgttgttccattcagttatccacatcggacgtcctccatacaggcgagtgcaagcatccaccactccattatacaggttttgtcccgattgcccattccaatacatgtgtcccaccacaaaatcaacacgatagttcaaactatctgccaactccaggaatttgaccaaccaatcttttctaatagcatcaggtgtaggcgatccaagccgtaaacccgattttaacagctcaggccactgcctaatcgcttgtatcggcgtacaattcgcctggtcagtatgatccggttcgttataacccaaaacatgggatacattgttccttgtattgatagtttcaaaagagtcccaacctaaattatgacgcataggaacatattcaaaatcaggattatccgtagcaccaccagcagcccagtcattgtaccaggaagaattagtgattgcagcaagtccgccgttacaaattcccttcttgctaacccattcccaacggaatacacgcacaaatgaaacaaattctaatccttcgggcatttcgggtacttcaatatctgcatcgctggcaatgtacactcgtgaaaagcccgtaccatcaggattattggcaagcgtgcaggaataacctttcttcagtctgaatgagcggattttgttatcgaaagtagctccaagttcggctgtccgatagtatttctccacttcaaattccatggattcacctccataattattttctgtataggctatcagagcatgttttgaaacttgtttcccttggggaataatcactgtaccacttccgtaaatggctatacgatccgtttctgcattgaaagcttgtccattgatttttatagaactcaaataattggaagtaacttccgaaggtttaacagattcaagatagagccaggcattgtccgaagcaagattaatattactgcccaccagcggactttcgcttgaaatgtgtaattcagaagttccattaactgtaatattcatatatttagcagattgaatggcaatcgtttcattgtttatggtaaggctcgtcatggtaggatttccatccggtacaaaccgtgcataaatgattgtattctccagaactggaatattgaaattaaaaagtgatgtataagtattgtccttataccagccactaaatacatagccgtttttggtaggttcaacaggaggatttaccacatacgattctccttctacaaaatattgtgtagcaacttcacttcctccatcagtattaaaggatacattgagggcattgcccacttctgtaagtaagaaatcggtagctatatttctatctgtgccatttgtcgtttgccataccatatagtatgtgccggacactgctgccgcaaagttgaagttaaatgtcgatagtgagttccacttcgcagaagtcttactttgggaattcaacattctacccattgcatctttcgacatattgatgccaaacatagtggtacaggtaccgtttacatttgagttgcgacaagtgaaattatagactttacctccggttagagaaaccggaaaagaaaagacattattattaacaggatgggtaatcacacgaccaacaccactgccaaaattatctctatacctatatgcataagtgtcgttactattatctgcattcacccatgtcacgtcactactacacttccaaccaaagttgctcggaatatctgtagttgtccccatgccgttaccatcccaagcagccatataatttactctaaaagttactgtgtaagtttgtgtagaaccgtcaccagccgtaactgttaccacagtactgcccggaatggcagatgcttgtttaatactggccgatgcaaccgaagctacagccgtagccgtaactgttggaatggaagcacccggagcaagatcataggtatatatgtaagttgtagccgagaaaccgggaataatgctcctctccaccaacagttcctttaaagaacaatcacggtaaatagcaagagcagtatttaggttactaatggctgttgtgaaatcactgattgtagaaccggaattatcgacaatcgcctgcgcttctccgataacagtttgcagatagtttattccggcttccgtaccaccttctttagcactttccacttcagatatcaacgtttgtagctgagtttttaccacactcgcatcttcccacttagcaaaaatggttgttgcagcagtaatagcaaccgagaagtcgtaaggtatagtaaattctttatcggcataccaaccatcaaaaggagaaccatcgtctttaacaggatcggcaggtttacttatcgtataagattccccctctaaaaaatattgattgtctactgaactgcctccattggtatcaaactttacggaaacagcattacctaattcagtaagttgcaaaagccagatgccagcctcattccagttgccaccattaacatgaacatcccaaagaaaataacccgacgtaaaaccctccggtgcaacaaaacgtaaactattgaatgtatttactacattgtttcccgaaagagtcaaagatttttttgaaacaggctttgttgccaacagatcgtcagcaaaataaaaattgaaggttgcacttccagatcccccatttcttcgccacgctttaccagaaagttgatagaatttgttttccaccggctttaccggataaccgtacttggtatccacctctgttatatacaacatctgatctgtaccattactggcaggactacctacatttatacgatatcgattgccagaagaagctgcgagatttccccaagtaatagagatactttcatcgacccgccaaccggcgtcataaggagttccagctgtatcgtcccaaccggtaagtaaattttgcgcctgtatcggcacactcatcaccagaactatgcaaattatccaagctgaaatcatcttgcacaatccagttttttgcttttgtttttccatacgtaataacttttaagattaatattctgcgaacgaaacaagtcttattgtttcaaattcatagaagcaaagttattccgcataagcgtaagcaatacgtagaaatgtttcaaaatgatttaattatgatgaatggcacatacgcctctattttttgcacctttcctcaaccgggttttactctccctcaatcgttcctcccgaagtgaaccgttccatatactcagaaggctgcatccctatttcctttttaaagatactactaaaataacgcgggtcattataccctactgcatacgccaattccgaaatacgcacatgttttttctcttccataatatggcaagccgctttcatacggatattacggatgaatgaaacataagtcaatccggtgagagacttcaatttacggaaaaaggttgattttgtcgtattcatctcttctaaaaattgagtttgatcaaatcccggatcatccaaatggcgatttacacaatcaatggcacgttgcaagaagtcttcatccatactggtatagttcaattctttcgcctcgaacaccagttgtttcttaaaatctttcataaccctttcacgtgacttcaataaattaccaatacgggcatgaagtacactcaaattgaacggttttgttatgaatgcatccgctcccgattcataggcctccacacggtcctcttcctgttttttagcagtcagcagaattaatggaatgtgggaagtatcagaatttcctttaatactcctgcaaaactcaataccatccatcaccggcatcattacatcagatacaatcaggtcgatatcttccgattctacgatttcaagcgcttctttgccgttagttgcagtatgaattttataatcagtacccaaaagtttcaccatcaagcctaatagatcttcattatcttcaactaataataaggtgtggctcttttctgccacattctgttctgccgaaacaacgttatcttctaatgcacttgtctgaatatcttcaatcaccacatcttcctgcacagcatctattccatccgaatccaacagagtcacggcatcatctatctcttcctccgaataagcaaaccgatgaaccgggaattctattttaaaagcagttcctttcccctcttcgctctctacagatatggaaccatgatgcagaacaactaaatcgcgtaccaacgataacccaatacctgtgccgatagtattaaatttacggtaatctccttcataaaaacgcttaaacaagttcttttgcgactctttcgggataccaggtccgttgtccttcacgattatacaaactactccattcgcttcatcacagctaagttcaattcccaccttaccaccaggtttattatacttggaagcatttgaaagcagattatatagtatcttatccagtttatccggatcaaagaaagctaagtatttattcatactgctttgaatagtgaaatgaatatccttcttcttcatcaacggacggaaaccatccagactccggcgcacaaacagtaccaagtctccctgcaataccttcagtttcagattacccgtctctgccttacgaaattccaatatctgttgcagcagacgtattaatctattaatattatgtgtcatcacatcatattgttccttataagcaggtgccgtctgtttcagttcatctacagaagccgaaataatggttagcggagtcaatagttcatgcgtgatatttgtaaagaattgcagcttagcatgatttatctcttctgattttgcctgctccatctcacgcagatgcaatgcattacgcaaacgaatacggttgcgaataatccggtagatatatccggcaatacctacaagtattattatatataaggtgtaagcccaccaggttttccaaggcggaggcagaataacaacttttacggtttgtacattctcatcccaaataccattagaattggaagatttcacataaaaagtataggtaccagacttcagattattgtaatacgcaaagcgttttgatgcatctgtatgttgccaacctgcatcaaaaccatctaatctgtaagcatactgattcctttcgggattggcatactccaatgcagagaactctatgctaaagttgttacgcttatagttcaggactattttatctgtgaatcttggtgacaaattcgatatttcggaacgttcctccccagagagagctgtccaggactgattgaacactttaatatcagtgattacaactggagaagaaaaaacctgttcatcttgtttattaggatagaagctattatacccccgatgccctccaaagaacatctcgccgtcagaagcaacaaatgacgctccccgattaaatatattatcctgcaagccatcagaagtagtataaaggcgataagttacattctgcaaatcccgtggcacagtgaggcgcaacagccctacattggttcccaaccaaaggttacccttcttatcgctctgaatattggttactgcatctcccggcagattccacaatttatgtaccggcaggaatacatcttccacagcatcataaagactcaatccacttccaccggttcctacccaaatacgtccttcaatatccctataaatgcagtttgcataatcactgttcagctttccattggaaaccgaatagccggaaaaagtatatccacttaaagaattcccactaccctgaatgcgaataactccatgtgtattggaagccaaccacatctcaccgtcacgtccttcaacaagttgcatgaccaccatatcccgcacagccacgtctccaaccttcaatgaatcgaagcgtaccgaagttccatccgccgcacgcatcgaaatcccactcttagtggcaaaccataggttttgcttggagtcttcacaaatatagtagatacaggaattgcacatccatggagcattcgaagagttatgtgctttcacgcgctttccaacaggggctgattgatctatttcataagctcctccgttgtacactccaatccatatatgtccggtagagggagattgcataatggacatcactgtagaaatccctctatatgagctgaagtcgggcatttgaccatgatgagtaaatttcccggtcctgcgatcttccacaccaaagccataagtgctgattcccatccaaagttgcccttcatcatccaacaaaatactacggacagaattacttttgagtatccgttttgcttcagataaacgatcaaggttgaactttgctttacgagtattcgccatattgacaccgccaccaatcatccctatccacataataccttgcctgtcacgcaacaaagaagcgacctcactacttgttatagagttttccgattcaccggaatagcagttttcaaaataaaagcgtgacgtctccacattccgcattggaagtatacttaaaccactacgagtccccacccataaagaattcgtattgagatcctcggaaatagcataaatcagattatcggaaattgtacccgacctattttcatcatgggtgaatgttgtccaagtggttttctccggattataagcatcatgcagcaaatgtaatcctgctccccaggttcctacccatatatttttatggctatcctgaaagacaacatgagctgagttaccggagttcatttgcgggtacttccagtatttaccggttctcttttcatagcggaacaatccctgactccatgtaccaatccatatatccccccgatcatcttcaaacaaagactttacagttgtttttgggaaaacgccatcggtattatcctgattaaaagctaaaaaacgattgctatcttccagatattcaagcaatcccccttctgtagcaaataaaatgcgattgtcacttgtcaccaatatttgagatatgccaataccatttatttccgagtcatctattttccgaatctgtcctgtttgcttatccagcacattcaatccgctgtaagtaccaatccatagccgatgttgcgcatcctctgccacacaataaatattgttattagttaatagatccggacggtataaattagatttataggtagtgatagaatagccgtcatactggaaaagcccgttgcgggtagatatccagatatagccatccctatcttggtacaccgactgtacgtccttgcttggcaagctgttcagaatagatgaagatttgaataccaaagaattaggttcgggcatcaccatagcttggcataccatggaaaacaatatcccaaagataaagaagaaactcctgatcttttctttcatagtcgatagttagcaaatattattaatctatgccgacaaatatacataaaaagttctaaaactatcttatttgttcgataggattattttcaggagtgctacactatcacaccaaccaatcactgattcagactgtggcatgtatgtaaatgaatatagatgaggaattaacaaaatgacaaattgataatcctaccctgtcacattcttttctttccgtaccgaccacggcatcatacggaaaaacgcaaggattctttatcaggtaaatccaaaagaatacggacagaaagaaataccagacaattagacaatgataagttcgaagttaaaacactatagaagacattattgacaatatctaaaaaaatgcttctttcagtccatttcctatttccaccgaaatagagaaaatattgcctgtaaaacgcaaggctacaccctttatgccggatggtattgcccttcagtcaacaaggctacacccttttggacctatggtgtagcccttcggaaaaaagaataagtcttttgggaaattacatggtatgttttagagtaaaagaccgtttgttggaaggtaaaagaccgtctgtttttcctaaacagacggtctgaattgaaggaaaagacaagtagaatcttccagaaggctctattccacggaaaaactcgttgttaataacagacacacacacacattacgtcattgaaatcaactattcagcatcatagtgacaattcaataaacttagattcactcgtcttaaactatttctgatatacccgaacgtaatctatttcataacgcataggaatacctttatcatcaatttcgccaccatttatgccaccaagagccaagttcagcaaaagatattgtggcatacggaaggggttcgttccttttccgataataccgttaactgtttcgctcaaaggaatttcattcagcaattcatcatccagatagattttaatagccgtttcatcccaatccatacgccagatgtgaaacttatccgcccacgccgggtctttatctgtaaaatgagtaaaaggaatcgctttactattccatcttgcattccactgccagtcagttccccaggcagcatttgccagaatatgcggttcacctttgatacgatagtattccattatgtcaatttcaccacacgaaggccattccataccactgcccaaagcccaaatagccggccatgcccctccgctcacgggaatcttggcacgaacctcgaatctgccatacaggaactctttcttgccggccgtagtgatgcatgaggaagtgtactcaataaactcccgcttcttccgccagtcattacttccggcctcataccagggatttttacgtcctttttctttccgtgcttcaataatcagctttccatctttgcagtaagcgttgcctttctgataccactgggcttcctcattgcgtgcaaagccattatcataactccaaacagtggtatccggaagaccgtctgtattaaattcatcactccataccaatttccactccgattgagcggacagatttacctcgtccgtccactcaataaacggaacaccctgttcatcaaactgtataggcagccaaatatgcccggaatacatcagactcttcggtttccagacatcagccataaatataaagcggttctccggcaactccaatacgaacgtactttgtccgccaaaggttttctcactgttctgtccgcggcatggattaggatgttgcttccacggcccccaaatggaagacgctgaaaacatacgggcttcattaggatcccaaccggtacatccggaagtaatcatccaatacatattatctttcttaaatagggccggtgcttcgttatgtccgccgggaaagatacggatgtagcgccctgaatgctgcaaataatcatctgtcagttctgcaatatgcagagtcaggttctcttctgaagaataaatgtgataagctttaccatcgtcatccacaaataaagtcatatcacgagacatttgtccgccttctatatcgcgtttcacaaacagtccctggttaacggccttgtaccactccggagtccaccactttttatatttcttcatgttccatgtcagcttccggtctgcctcaggcatattctccggatagattccggggttcacccgtccggaacgaacaaagcgataaggtccctccggtttgtcactgacggccacagccgcgcgggcggggccataaccttgacctttcagttccagatggaaccacattacaaacttcccggtcttcttattgtatatcactttagggcgctccatgatgcaaccacgttcaatatcgctaccgggttcttcggatacggcaagcgctacgcccttgtgagtccagttctgtaaatcggaagatgcgtaacagttcactcccacttcggtagtgaagccgttttcagggcgatgttcaccaaaccagtaatataatccgttatgaaataaaacgccgccaccatgggcgttgatatattcattattaacatctttccaccgttctttagtctgcgataatagaggaagacaaataattgtcaataataagaatcctcccaaatactttatatatttcatatactattacctattttacaaatattccgtactgccccaatgttctgttaggttcatagggacaatacggaatacaaaattaaagattttatttattttttctgataaactcgtacatagtctacccgatattcaagtgggaatgtcgcttctataggtcttccattaaccccaccaatagccaaatttaacatcataagctgaccaaaaccttccaaatcattggagtaagggttaatataaccaccctctccggcaccatggtcacctttattataggttgtactcaggtcggtttcattcagaagtacatcgtccagatagatgcgaatgtatttttcatcccaatccatcatccaaacatgatatttttccgcccacttcgcatctttggacgtgaaatcagtaataggataatttgcagaattccatgaaccatcccaacgtttatttccaccccagcaaaggttagcatgaatcttgttcttatagaattccagaaaatcgatctcaccacccagcggccactcataccagttaccggtagaccatatcgcaggccatccaccttgctcaataggtatcttagcgcgtacaaccagtttcccatatttgaaagcatacttgttttgggctaccacgcaagcggaagtatattccgcatattcacgagtctgtttccaagaattaccacctgttgcattcggattgtagttcggattcttcacgcgttcctgcttggctgtaaagaccaatgcattttctttcatctctgcattatcctttttataccactgatcttcttcattacgctggaatccttcttcaaatctccacatgtcagtattaggtgcacctgttccattaaattcatcatgccagaccaatctatatccgccttccaattcatgatcatcaggcacaccttctccgtcagcaatgtattcaggtgatacataggtcacatcaaagaaaaacataatcgtgtttgtcttatcatttatgccataagaagttgaattctgaatctgtacaggtagcacaaatgtaacgctctttccacgttcattttgtacccattttatcagttggctgcaatcaacattcagttccacttcttcagattgcttttcaccagcattcagtgtcactttgtttgcagagaaattgtaatatccttccggtagaagttcaacatctttatatatagcataagcagaagacataccagccatagcaatagctttattcaaagaatctgacgctattgccaagtctacagtggcatcctttgtagcctgccggttctgatacagtgtcaagctcaaccgataattaaattcatctaccttttgttcttctcctactaaaggttgcttaatactcgtagttacattacatttcgttccatcccacaaatcacgagcctgtttgatacttaataagtttaaatccaaatttcctttgtaactaaagtctttatcatcatcacaagcggcaaaaatgacagaacaagcaatcatacaaagaactgcccatttttttatcttagttttcatattcttatccctctattaaaattaatccaaaggagctgtttccgggtcatagacttcaacttctacatcatagaatttaaactctgccatattaaaatatttagtattactcgaagtcgcaattacattaaaacgaaaataggtaaaactctttccaggcattacaaattctgatgtatattcatcaccgtgacctgtaggcagacccgaaagggttgtcaatgtttcccacgactctccatcattactaatctgaagttctacagaagatggacgtgcagcggtagtccacgtatcatcaccccttgtacgataatagacagagaaattctcatgtgcttctttaaagtctatctgaatataatgtggcaaatctatctgtggagaactccaacgagtatgaaaaaaattattcacatttccatctaccagattagaaataggtccttcactaggctcttgggcatttgtgctcaattggctggcagataatgcaaactcttttcttgatttctcttgaactgtaataggagcagctccagacttagcttttatttccgtaacttcactaccttggttttttacattaaaagtctggaaataaaaagagtaatcaccgaaacgagcaagagtgttatccattgtcagctctgtagtatatttagaagcaatctcacaaatctcttcttgtgtccatgggtctctatattttacctgtaaatattcataagcattttctgcaggagcgtcccataccaactttatctgccctggtaatgcttcagaatcaacagatgaacttgcaatagcagtgggagcatttgctccccctgatgtttcgtatgtttctagtttatcatcacaacctgtaatacaagctaataaacctgttgtaatccatatatattttagtttcataatcttctatttttgaaatttacataccttatttatcccagcctggattctgttttaaattcggatttttccgaatttcactatccggtatcggatagaaatacattttatcatcccaaaccaatgccttgatactgcgagtataggtaaatgaatcatcagaattcttagtgattagcattctgccgatactagtaaaaccaccttctttccaacggcgtacatcccaaaagcgatgaccttcaaaagctaattctaccatacgctcatttttatatcgactccagaaatcactggagctcataccttcgggaaaatcaggcatatctaccccagtacgtttacgaaccttattcacagcctcacgtgcagtcattgtcaattccgcatccttaatatcagcagaaccaaaatacttaaaggtagcttctgcataattcaataagaattctccaaggcggaaagttatccaactgtgacgtttgccaccagaactcgtactagcactaatatctgtagcaccatccacgtacttcttcacataataaccagtaggcgttgcataaggcaccggagcagcgtctcttccacctgtgtagatctctaacggattgggatttgtattgggccatttatcaccattcaccgcaattgtcatagcaaaacgaggatctcttccagtatagggatctttctgattaggttcacctccatttttcatttcataggcatccaccaaggtctgagtaggacaattgcctgatttagcgttttccatgccaataggaaaatttgtccgttccggatcgtcagtatcgccaacacgacgcacaaaaatcatctctgaggccttccaattatcagccccccacagatccgtatatttacctaaagttatattattctccccacagtaattaatgacatccaaactggctgttgcagcccttttgtataagtcccgattttcactgtcattgaataatttactagcgcaatacagtgatgcacgcgctttcagcgctaatgcagcaccgcgcgtcacacgccctgcttcagggttagtaccacctgcggcatcattatccagtttggaataatcaacaggtaattggggtgctactgcatcacattcacttatgataaagtcaaagacctgtgacgccggcgtgcgttccaaactgttggcttccgcctctgtcagtactttcgttgtaaaaggaacatcgccataggcacgtactaataaaaaatagtagtatgcacgcaacaaacgtacttcatattgataacgtccatagcgcttcatctgcgcctcataatcctgattaagtatcaagtcggagaattccaaattcaaaccattctccaagaagtaattagctgcacgaatcggagtgtaataattccattgagatttaggattgagagcagtccaattaccatttgtataatcaagtacattagaatagtttaatgccatttctgcttcatcgcaagcagaagccaatgaagttgttcccagcagatcataatccaaataggaataaatgttattcacaaatgcagctgtacgtccgaagtcggaaaatacatactccttaccgtagttggtatattcgtgatagtccatcttatctgtacatccgaccaatgctactgtacaaacaataccgaaacatatattctttaatttcatattgtaattctttttatataaattctgttatttagatacctaacgataaaccaatgtgtatagaacgggtagcaggccaaacatctccaatcgcttccggatctgtaatatcaactttatcaatactaaatagatcagtacctctcacataaatctttgccgttctcattttaatcttatccagccaagaagacggtaaattataatatacctcacagttacgtaacttcaaaaaagaacggtcctgcaaccatacagaactggtttgagtattattctctacagcctcagttgtcagacgcggaaaacgagctgaaggattctctggtgtccaacggttgtcatacgcatattgtgatatggatgtattgtttatcaacggacgataaatactggaattcaataaagcagtatagttgcttacaccttgaaaataagcattgaaaccaatccctctccattctaaaccgacattaaaaccataataaatctcgggccaagcagtactatatcccataggtatcatatcattagagttgataacaccatcattattcacatctttatatttgatatctcccggtttcaccggaccaaattgctgaggtgtactattatcaatgtctgcctgatctacaaaatgtccaatagcttgtaatccccaaatctgtccaagaggtttcccttttgcacttaaataatcataggctttgggctcttccagattttcaataatctcactacggttgaatgagaatgtacctcctaaacgtaatttaaaatcacctaatttcttactataatctacacctaattccgtgccccaactatcaacaataccggcattcttataagggcttgtgatacccaacacagcagaattctggccgcctgcacttacccaaatatctgaacgtctttcataaaatccatcaatagtaaatgtcaagcctctcaataacgacacatccaaaccgacattatatttataggccttctccagggtaccattcaaggaaggcaatgcaccttcactccacccgctgtcaccaccaaagttattgttcacaggatatccacctgcactgctactcattttatcataccaataaccttgatatggagtgttatctgtattaataataccaaacgaagcacgtaatttcatgaaatctatcacactctgatttttcataaaatcttcattggaaataatccatgacaatccaactgtaggagccggtaaccaacggctattaggatccagattattagaggcagagaacatcaatgtaaaatctgcaaaatatcgattattatatccataatgagtataccaaccggcactttgcgtatacaatgtcacattggtcccatttctatcatcaaatttatacgtgtataacaacatactataaagatcatgcttgtcaaaacgacgtttccaatccacattcatctggaaattgaaagaacgatattgccagtccagtttagaagaaccggaagcattgctaaccgcacctcccgtaacatcaactaaatctacaggtacgccatcttcccaacgtgatacagtctgcattccccatttttctcctctgcgataatcctcccagtaagaagctaaattatcataaccgatacgcattgaagctcccaatccctttgtcacagcagataaatcctgacttaatttcatatctgcatataacgcacgggtatgtcccttcgtatatccatgtccctgtgccagataaacaggattataatctccgctccaagtgttattaccaccccacagaccttgttctgatttaacaggaaatgcagcggaaggaactgtataaagtttaccaatcaaattatcaccagcagaactcggtctgctgaactcattcaatacaccggaaatattcgcctgcaaacgagttttaggtgccaaatcaatatccaaatttgaacgaaagtttgctctggaatatttagcctgagtagaatatccatcattagaatctgcattcttgataaaaccacgattattctgcagattcagcatcgtaaaataacgcatcttagtagaaccaccacggaaagtcaaagtagcgatatcagtagttccctgatcacggaacacctcatctgcccaatttacattaggatacagatatggatactgcccactcttaaaggcattcagttcattctgtgagtaacgtgcagacttaccatcattagccaaagcctcattcatagcattggcataggtaaaagcatctgccatttcaggtatacgggtctgatagttaaacccatgatcataagagaaattaatctcacgagtcttgtatttaccacgtttagtaacaatattaacaaccccatttgctccacgaaaaccataaagagctacagccgccgcatcacgcaaaatacttacagattccacctcttccggtgaaatataatttaatgcctgataagcattatcacgttccaatccatctacaaccaacaaaacgccttgattgctcaatgttttcgaaccacggatagccatagatgatatctgttcccatacatcgcccgttttttgcattgtataaagtccggttacattaccatataaggcattacccacattaaaagtggaacgattatctatttggtcagcatataccgtagaaacagctcctgtgctttcagcattagtctggctcagtccaaaaccataatttactttttcagcagagaaatccataacaatcgtcatttcctttccatctgctacaggtactattttcacatcatcctttcctgtacgtacctttaaaagattgtccttatcagcagtaattacaaactgacctttgcgatcggtcgtaacctgtacaagcgaattgttttcaacagaaatcaatgcaccttctaccggattacctaatttgtcaatcactttaccgacaacatttccttcctcttgcgcccagcctttcagagaaacgcaagcaaatattgctaaaattactattttatactttttcatgttgttcttttctaatttaacggttgttctttatttctgttaccaacccggattttgtgtcagtccataccccttattgatttctgcaacagggaatgcagacaagtaccatttagggctaaagttagtccaccaagaacgtgcactaagaacaaaaggctcataagtaaattctgtaggccatgggtattgggcagagttaccatccgaacctgaccacggttttttgccacttccatcattacgataaacttttaatccatgaagttttttctgaaataagtcagcgcgtttataacgaatcatatcgaaaagacgcacatcttcaaaacctaattcacatgcacgttcacgcaagatttcctctaacaaagcatccgaattagaagttaaatgcttgtcaggattacactcagccaagcctcccaagccaacacgtccacgtacaatatccacctgcgcgattgctcccaccaagtcattcttagctttcaagatagcctcagcatagatcaaatataactcagataaacgtaaataaggccactctaaataagtaccattaaaacttccttttccttctttccagaatttatagagacggaaacctgttgcagttttattagtttccttttctgtatcagtcagattatcgcgtccgcctaaccacaattcagcaccgcggctatcataagaagcaccattcaccaacatagtctcgtacaaacgaggatcacgtacaggtttattccgatcattattctcaaagaaaggatcagctccatctgcaagcataacctctggatcaaaagctttaccgtcactcatcgggaacatttccataaactctaaagtcggagtatatccacgattgttaggccaaccttcttctgagtcattattagttccccaatagtgccaccactcaccaccatatttacctgttactctggtcgaaatcaataattcagtgttgttttcacgaatgaaataggctttattaaaggcctcgcgataatcagtacccgatgtccctttagcctgtatcaaagaataggcatttccctgtttcgcattttcttcaaagaaattatagcaagcttgccaacactgttgccacaaatcagcattatagccaccataccagacttgtaaattagttactgcttcttgaggaggctctgtacagtagggttcattatcattgaacagaggacttgcagcaaacagtaatattttacatttcaatcccatcgcagccgcttttgtaaaacgcccctgccaattatcctcctcagtacctaagctccaaggcattgcagaagaagcttcatccaacagtcctaccataaacttaaccgtctcatcaacagtacctcttggtatttcatattcagcttccaccccataagtacctcttataatagggagtccaccaaaatgacggaacaagtcaaaataacgggaagcaataatgcatttagcctcagccttcaaccgctctttctcgtctgtttccatatcgggaacgcggtctacattctctataaacatccatgaagagcggattgcaggccagcaatcctgttttaaatatccaaaacgagtatcactacctgtttcattggcagcagtatatgaaccaggataataatgtcgattcactccatcccatccattatggctttgataacaatctgataatgcttcaaataccccggtattcattttagaggtcacatcgccccaattataaggtaaaccgaaatacattttgctataagtattccaaagaaaagcacgagcataatcagcttttccaaagattgagtcttgattcaaatcacttgtcgtaggtggtttctcaagaaaactatcaccaaactttatttgatctacgcatgatgcaaagagtatagatactcctacaaatgccattataaaccatttagttaaatatttcatatcttaaatctctattaaaagttattggatttagaaacctactttcaaaccgatattaaatacacgagtcaacggataattaggacggtcgctctgacgagattccggatccccccaatcaaaccctgtaattgtcaacaagttatacccattaatatataagcgacagttatccaatttcatttttttcataaatggaaaatcaaaattatatccgatttccacattcttcagacggagataacttgcattaatcaagtaaaggtcggttcctctatagttattggacgcatgtgagtttgaagcacgtgggaatttagccgtaaatgtatcctccgaagaacgccacgttgtttcatattgataaagcaacaaagctttactgtttgtatcacccagcgggcgtctgaattcacttaacatacgatccacattccaagcccctgtccattgcatagagaaatcaaaattcttccaagaaaatcctaaattcaatccggcagtatattctggaatatcagtgaagccgatatctcgggttgcatcatcaccattcaaaaccccatcaccattcaaatctacgaagacagcatcaccaggtgctaatgtcattccgtgatcagcaataggtcttccatattctgtttgataacgtttatcagccgtttcatcgtaaaaaccccaaaacttatacatagaacgcgaacctatacgacgtccggtttcatacatccattcctcattctgcgccacttcatttttgaaaatgatcttattgcgagcaaatgacaaattgaaattagcccaatagcggaaatcatcattcagtttatcgttccattttgcctgtatttcaaaacctctgttttcagtctttcctacattaacaacaggcagtgtcatacccaaaatgcccggtaagtaatcaggtgaaacaagaatatcacgacgtttttcgataaaataatcagcagaaacgctcaaacgctcatttaagatattaaaatcaataccatagttttgttttacagcggtctcccattttgcatcaggattactctgactggcctcccatgcacctggcttcttattatttacgttcgttccaaaataatatccatcaccacttccataagaatatttacccggcaaatacaaaaaacgattgctacccatcctgtcattaccaaccataccgactgcggcacgaactttaaaatagccaacgactttctttaaaggtgcaaaaaattgctcctcacttaatacccaaccaatagaaccggcaggaaagaaaccgtaacgattctccggggcaaagttctccgaaccattatagccggcattaaattctgccatataacgagatttccagtcataagtaatacgccctacaagccccacataaccagaaggtatataatcataagtaccgcccggataatatcttttagattgattataaagtaataatccacttacattatgatcaccaaacttacggctatagttcagagccaattccatataccagtcgcgtgccttactgtatccgccttcactatagctggtttgagtatcagagccttctttacgatacgcaatgccattttccgtaattaccggagtatattttgctttggatgagcttgcaactttagttgtcccataactagaattataagatccttttaatttaagggaaagtcctttagttacaaaatccaatttctgatcaaggatcatatccagattcaaagtgttagtcgtcgtattacgaaaacccttaccataatatgattccaagccatccaccatattcaaagaaatatactcttgattagtgacaatacgtttaccatctacaatacctgccccagcaaaaggaactgcccagtaaagtttacgaaacagctgattttggtcttcaccagactccggcgtacgctttgtatctacacgtcccccaatattgacagacaatgtagtagatttcgttacgtcaaaatcaagattggcgcgataattatagcgcttataatcaaaattcgcattgttatccgcacccagtttcttgaacataccaccttgtgtaaacaaacctgtagaaacaaaatagcgcatattatttgttccaccggaaatattcacattatgctgtgactgaaatgaagctttgttcatacaataatcaatccaatttatatctggatacataatcggatcagtatgatctctgaaagcaaccaattgctcatctgtgaaagtcggctgttctccatcattaatcttcatcatattataatagtccgcatattgataggaattcgcaaaatccaattctttcgtacggacattgacaccagcggaagttgtaaatgatattttagctttaccttcggcaccacgtttagtagtaatcaaaataacaccatttgcaccacgtacaccgaacacggctgtggcagaagcgtctttcaaaacagtaatactttctatttcgttcgggtctatttgcgacatatcacgctctacaccatctacttgaatcagcggagaggcatcttgccacgtagctacaccacgaacataaatatctgccgcatcagcacctggttcaccagagtattgtactgaagaaatacccgtcacctgaccagaaagaatattagaaattgaaccggctggcgtttttaataaatcatcccccttcattgaagaaatagcacctgttattgatacttttttctgagcaccataagctacaacctctacctcgcctaacatttgcgagtcttcttccaatactatatttagactaataccttttttaataggaactacctgttccttatacccaataaaactaaattgtaatttacccccaacaggaacctccaacatgaaattaccatcaatatcggtaatgacaccagtggctgtgcctaccaccatcacattagcaccaataattggctcaccgttagtatccttgactgtaccagtcacttttactgtattttgctgcatgccttctgaagagaaagcttcgttactatatcccttaagagggacagataaaaacaaaaacaataaaattgcaactggaaataatcgacataatttttgagcctgtcgtttacagaaattttcttgcttttccattagcaacaattttaagattaaacatatatttaattattaagtctcattatatagcccttactggacagaacggctagggaaaaagataatagtatcaattatctctcctgttttcttacttacgaattcaaaaaagaccggaacaggataagcaaccttaaactcataaaatccagtattaatttcttcataatagtatggagttgtacctatttgagagaattgtacattaacattttccaatacctcactcccaacaaagaataatgtagtagcatccggatatatattctgcgtataatcagtatactctgatatttccggagttactctgccattcggcaaagtataagaatactgtttccaccacccattccttatgcgtttctttaactctgcatcactatattcagttgcagctaataaactaaagttactgattgaatctgattcaatcaactcatctgtaacagcccttgtgtcggatgccaattcaggcaatgcaccttcatccaatccagtaattgtagcatcgtcactacaccctgtaaaaagactaacagacattgcagcaacaaaaagtactgtaatcaatttgcctcttttgtttttcatgtttctcattaattttaagattaaacattggtttgttatttacaacaagaactaaaaaaatctctattattttcattcttgattgcgacacaaaagtatgggggcaaaaagcaatatggcttctacaacagcccaaacagatgctaatttgtctcatgacacaattttctacatgaaatgaaacattattctacataagttttcaaatgtgagagagttttaaaagaaatgtataaaacgaataaacgggtaagtaacacaataagactgcaagaacaacattccattttccggaagttgttcttgcagtataaaagacaagatggttaataaatatatgctctatgtttccggaacatcatcttccactgtgccattcgaagtaaagcgctccatatattcggaaggttgcataccaaactctttcttaaaactattactgaaataacgcggatcattataacccacagcatacgccaattctgaaatacgaatattcttcttctcttccattatacgacaggctgctttcatacgaatattccggataaaggaaacataagtaagaccggtcaatgacttcaacttcctgaagaaagtcgatttagccatatacatctcctccaacagcttcgcctgatcaaaatccggatcatccaaatgacgatgcacacaatcaatagcccgttgcaggaaatcctcatcaacactggtgtaattcaattctttagcttcaaataccaactgttttttgaagtcctttcccatacgttcacggctccgaagcaagttggagatacgtgcatgaagaacactcagattgaaaggtttactgataaagccatcagcaccggactcataagcctcaacccggtcttcctccttattcttagccgtcagcaaaactacaggaatatgggatgtttcaaacttatttttaatatactggcagaattcaatgccatccatctcaggcatcattacgtcagaaacaatcagatcgatctcttcctgctctaccacatctatagcttccttaccgttattagctgtgtaaaccatataatccgcacccaacaatttcgtcattaactgcaataactcttcattgtcctcaacaatcagtaaagagtacgaagatcggatagcagtcggctcggcttgttcctcactatcatcatcagagacattttcgccaaactcatctgataacagttctttctttgcttcttccgcatctgccggcagactttcttctatttcttcctccgcatacgaattacgaagaaccgggaagtttacaataaacaatgtacctttcccttcttcactttctaccgtaatagtaccatgatgcagcactaccaaatcgcgaaccaatgacaaaccgatgccggttccaatagtcttgaacttccggtaatctccttcataaaagcgtttgaaaaggttcttctgggcttctgctgatataccggggccattgtctttcaccactaatcgtgctgttcggtcttcattttcagacagttccacactgaccagaccaccggcacgattatatttagaagcattagacagtaaattatagagtatcttatcaagtttgtccggatcaaaataagcgttgaaaggatcgggtgaacatgaaatctgaaactgaatatctttcttcttcatcaacgggcggaagctatccagactgcgatgtacaaattgcgtaaggtcaccttcggaaacccgcagcttaagatttccagtctccgacttacgaaattcaaggatttgttgcagcaaacgtatcaggcgattgatattgttattcatcactctatattgctccttatacgtgggtgcggtccgtctcagctcatccaccgaagcagaaagaatggttaacggagtcagtagctcgtgagtaatattagtaaagaattgtaatttagcatgattaacctcttctgccttagcttgttccatctcacgcaaatgcagagcatttcgcaaacggattcgattacgtatcacccggaaagtataatagataatagcacaaacacatataatatataaggtgtaggcccaccatgttttccagggaggcggtaaaataacgacttccatccggagcatctcatcatcccaaatgccattggcattagaagctttcaattggaaagtataagttccgggcttcaggttattataataagcaaaacgcttggccccacccgtatattgccagtcagaatcgaaacctgccaactgataagcatactggtttctctccggattagcatactccaatgccgaaaattcgatgctgaaattattatgccaatggtccaactgtatctcatctgcaaaagcgggtgaaagttctgaaatctccattcgctctttagctggcagatttccccatgactgattgaaaatcttaatgtcagtcactatcacagaagaagaaaaaggctgttcctgctgattctcaggataaaaactattatatccccggtgtccgccgaagaacatttcaccgtcaactgcaaccgcctgggcactacgaataaatatattgtcctgcaaaccatctactgtggtgtacaaacggaatgtcgcactttccaagttatccgatagggcaagttttatcaatccggcattcgtacccaaccataaatcaccctctttatcactcctgatactgacaaccgcatctcccggaagattccatttcgcatgtaccggaagaaaagtgtcggttgcttcatcatacagattcagtccactgcctcctgttcctacccaaatgcgtcctttggcatctgtgtaaagacaatcggcatacacactgttgagctttccattcgtagcagaataacatgaaacggtatagctccctttttcatcacaatgaagccgaaaaactccatgtgtattggaagccacccacatatctccgtcatttccttcggtcatatacatagtcggaacgtttctcatctggctatttcctacttgcaaagtatccagccgcaccgcttctccatccattgtacgcattgaaactccattacgcgtagcaaaccaaaggttgtgctttgagtcttcatagatatgaaaaacacaggaacctgccaaccacggcgcatcctgagcataataattcctcaccctctgtgccacaggcgccttcttatctacctcataaactcctccgtcataagctgcaatccaaatatgtcccgttacggaatgttgcatcatagacattaccgtagaaataccacgataacggtcgaattcaggcatttgagtataataagtaaatttcccggtttgacgattcttcacccctaatccataagttcctattcccagccaaagtaatccttcatcatccagcaaaatactgcgaaccgaagtagtcttcagcatccgtttgacttccaacaactgatcccaatagaaatcagctttccgagtactcactttgtttacacctccaccaatcatacctacccacatcagtccctgacgatcacgcaaaagggaagccacttcgtcactggctatagaactatccgattcactgggataataattactgaaagtctcagcacccgtgtaattccctgtcaacggaagtacactgagtcctttacgggttcctacccataaagaatgagtattaagatcttcggataacgcatagataatatcatccgagataccggcaaggttcttttcatcataccgataagtaatccaagtggtcttatccggctggtaggcatctttcaacaaaaccaaaccgccacgccaagtacctacccaaatattcttttgactgtcctgaaatacataatgagcagagttttgttcattcaaccgcgggtatctgaaatatttcccggttttcttctcataacgatacaaccctgcatcccatgttccaatccaaatatctccccggtcatcttcaaacagagatttgatggcagtcctgggcatcacattccctgtattttcgccaccatggcataagaaatcatctttatcttcctgatactcatacactccccaatctgttgcaaacagaatacgttcatcactggttatcaggacttgagggatactattaccattcatctccggatgatctattttccgtatcgcacccgttttcttgtccaaaacattcagaccactgtaagtaccaatccaaagacggtgttttgcatcctctgccacacagaaaacattattattggtcagcaaatcagtgcgaaaaagattggatttataagtagtaagagaataaccatcatattggaaaagtccattacgggtagatatccagatatatccgtcgcgatcctgatagacagattgcacatctttactgggcaaactgttcaatatggatgaagacttaaacaccagagtgtttggcttaggtgttgcgatggcctgacataccaaagggaaaaatattccaaagcaaaatacaaaactccagattttttctttcattgtaaacattaccttcatggttaactcggtttagaatataattaataaagcccgacaaatatacgtaaatatatctaaaagtatcttatccattggtaatattatatttcaataattctatatcgggacgtacccgggatgtacttgctccgtaccaagtccgtagtttctccgtccagaggtacttctgaccgaagaacgtacggagcaagtacggtccagatacgattcggataaggagctgataagccccaaaagacaatattgatctaaatttcaccctttttggcactaaagtagccgtttacattgcagagaataccttttctttgcagagaaaaataaataagaatattcttaccatgtaatacacacgcaatgatgaaaattgtattctcaaaaatgaccggaggattattactatttactttattagtttcattaaaagtaaatgcctccctgccacaggctaaaaatgattccgtatttcatttagtacaaccggactacaagttgagtcctctcaccggtatgactcgccaacattggcttgatgctgcaacctatttactggacggagcattcagctacattcacacaccggacgatccgatgcatttcccgaaacagccgggaaagagttatccaacagatggaaaacctaataaaacggagaatttggagggactttgccgcactatgttcgtagcaattccgctactaaaagaaaatccggatctggtactgaatggaatcaaagtcggagattattaccggcaacagttgcgcaacatgagtgatccgtctaagcccggatatattcaacatctcaaaggtgggccaagccagacgcttgtagaattcggagcactcgccctgtcacttactgtaatgcctgaaattatttgggaaccattgacacaaaaggagaaagatgatcttgccgcattgatgcttagttatggcaacgggcctacaatcggttctaactggcgtttttttaatatattcgtcatgtctttcttcaaagatcagggttatgaggtcaaagacggttatatggatgaattgctgcaaaaatcactggcacaatatcgtggatatggatggtataatgatagtccggcctatgattattatagtatgtgggcttttcagatgtatggtatgatttgggcgcattactacggtgagaagttcaatccggaagccggacgacagtttgtcagcaacttccgtgacctggtccctaattatccctacatgtttgccgaagatggaaaaatgaatatgtatggacgtagtattacgtaccgtatagctgccgctgtgcccttcccgctgatggggtggctcaatgatccgtctatcaactatggctggatgcgccgcattgcctcttccaccttgctccaattccttgaaaatcctgcattaatggaagaccgggtaccaacactggggttttatggggcttttgagcctgccgtacagatttatagctgccgtggcagcgtttactggatgggaaaagcgttccttggattattattgcctgctgataatccgttctggacggctatcgagaataacggagcttgggaaaaagaacttcaatccggcaaagtatacaataagttcatggaaggttccaacactttagtgaccaactatcccaatagcggtacttcggaaatacgtgcatggtgccatgaaacagttgccaaagactggcagaaattccgttctaccgaaaattataataaactgtcttataacactgcattcccctggatggcagacagcccagatggtaaagtgtccatgaactatgctgtactgaatgacaaacaagaatgggaagtattgcgcctctatacattcaaaaagtttgaagacggaatttactaccgggatgcagaacttgaaacaaacccggaaatcaaattccgtctggcagatattccgcttcctaacggtattctgcgtgtagacaaagtttctttcccgcttacgacagaattacgttacggacactattcattaccggaattagaaagtcacattgttacaaaggaacaaaaggccggaggatacactgcctactgcatggataatggtgcctatcaaacagcgcttatcaatctccagggttggtcggaagtggaatttgtacagactgaaggactacatccggtaagtaataaatgttctgtaatcaatgcagccacaactcattccggtgataaagtctttatcacactacaattatggaaaaagagtggcaagccatttactaaaaaggaactgacacctgtaaagtcctttaaacagaccggagacactataaccatttatttctctgacgggacggtaaagacggtttctctcccctgatataagtttcggaaggaatagttatctttgccgccaaagtaagagctacgaaagctcttctacagaaacaatataattatggcaggcatctacatacatatccccttctgcaagacacgttgcatttattgcgatttctattccactacacgttcggaattgaaatcgcaatatatccgtgccctttgccgggagttgacggaacgcaaggaatatctgaaaggggaagctgttgaaaccatttatttcggtggaggtacaccgtcacagttatcggaggaagactttaaggaggttttcaaaacgattgaacaggtttacggaatgagggaagcaacagaaataacgcttgaagcaaatcccgatgaccttacggaagaatatatcggaatgttgcacactctaccgttcaaccgcatcagcatgggaatacaaacttttgatgatgcaacactgcaattattgaacagacggcacaatgccacacaagccatagaagcagtaaaacgctgtcggcaagcaggttttcagaatatcagcatcgatttaatttatggtttgcccggagagactgaacaacgttgggcacaggatttacagcaggctgtcagtcttgatgtagagcatatttcagcctaccatctgatttacgaagaaggtacaccactttacaaaatgctgcaacagcactctgtatctcaagtggatgaggacagtagcctgaacttcttctccacattgatagataccctttctgccgctggatacgaacactacgaaatatccaatttctgtaaacccggaatgtactcccgacacaatacttcttattggcaaggtatcccttatctgggatgcggcccgtccgcacattcctttgatggagactcgcgcgaatggaacgtagcctcactaaatcagtatctttcatccatagaacaagggcaacgccaacacgaaacagaacaactggacacacaaacccgctacaatgaatacatcatcacaggtctgcgcacaatgtggggaatatccactgaagagctgaaaaagaagtttggcgaccgactttggaaatattgtttggaacaagccagttcttatctggaaaatggaaaattagagttacataacgatcggttaaagctaaccagagagggtattttcatctcagacggtatcatgagcgacctcttggaaatagaatagttacatatacaatatgcccggtcctgatatatttcaagaccgggcaacttaacaaaacaaaccctttttacagagaaatagtatactccaatcctttatcaggagccactataaaattcgtcacttcaaaattcatatctcctcctttgatgctattatcaaatccgatacggacactataacgtgtatgcggcttcagcgtcatatcccgaaaatagaccagagaagtatcatgtgccgtctttttcagtttcaggactaaatccgtagtattggttatagagagcgtcactcctttctcattacggctgatctcttctatttctacacatttttcaaagaatggacgaagcaagtcttcacgtccaatcaccaactctcgataataagcagcagtgcgacgattgtccaatgcttcacggatgcctttcaaggaacgttctttcgcaaagacgaatgtcatggtacgatgctcatctttagagaaatcataatcagtctgaatgggttgatggatatcggaagtgccaatcattgtcagattcttatccaaacaccattgaacagcttcaggcatatacagagggccatttgctacttcaatgccatgcatacaaccttcattatagagttctgtgtgctcgggccaccacttagtagtatccggttgttgggctgcccatccgggatgattccagaaaataaatgctccctgctttttggcttcattgaaagcatctttatactctttttgttccaatgggttggagtcagccagaaaaatggcattaaagtgtccgggagccatcggacgggtaatctcactacctctgattaaaagtatccccagcttttcagcctgtttctgacaaagatcgaacgaacggttatgatctgccacaacatcttttttatgaggacgatattcgatgtgttctgtcagagaaattgcatccagtccttcacgataagcctcatctacacgtaccgtaggccaaaccagaccatcagagaaaacagtgtgcatatggaaatcgcacttcaaagtagtgtatccatctaaatcgggaacctgaatttcattccggcgttgcgcctgtacattcatcaggcagattgccaaaaggaacgcacttactaatactttctttactttcatattatctgtttatttttatcattaaagttactattaccaacctgggttttgaggcaataaagccggatttatctgagtagccgtcaacggtatcgggcgcaaatatttcttatcatcccatttacgtccctggctaaagccaaattcaatatatccgtggtcaccttcggacaaacgattggttttaccaattaccacatattgcacgcccttaatcttctcaccggctggcggttctttatccaccacagctacatcttttgcaccatcgccgttcagatcatacgcttcgcctttctggggaatataaataccttgccatatagtttcaatcaggtctccctgtttccaacgcatgatatcatcatagcgaactccttcaaaagccaactccacaccacgttcacgacgtacttccagcacccatttatccgttgtttgatttttaaagtaagcggctacatacgggtcataggtggcagggatcttcccttccactccggcacgttcgcgtaatggtttgaccgtagcattccacaccgtttcatcacattctcctaattccgctttcgcttctgcataattcagcaatacttccgcataacggaaaataggaatagagttattggcagtagcctttcctacatgcacatcgtcatctatagcccatttaataagctgatagccggtggatgtcatagagaaattaggtgcatccggcttcaccgtaccactgattttccgctggtaagatggtgaaataactgtttgcatcaagcgacaatcacgattctggaactcatccatatactgcatggtagcataatccgtacggtcggtgaaacgattaccgtcgcgcatcagatacatattgacaaaaggccgtaccaatgaccagtttgcaccaaatgaggctgagaatagtttccaggtaatagagtgcatacgcaaatcctttttgaaggcaataccccagattacctccgttgtgttcagttcttccgatgtaaacagagaacgatactgtgtctccacatctcccgtattcagtaatttataagggcctttcgtcatcagttcttcggatgcagtaatagaagcacgcagaaatttttcagccgagctttgcaatcctaactccgtatggtatttacggtaagtaccttcgaacagacagatacgggatttgagtgctaatgccacccatttcgttatcaatgtgctactttctgtcaaggtcttatccgtggaacaattggtacaggcaaaatcgagatcttccaatatcttatccatcacaacctcacgcttatcacgtggtttgtatagttcatctctattatccacatccaatgtcgtttcataccaaggcacatcaccgaacgttctgaccataccataatagaaataagcacgccaaaaacgtcctacaccttcattatgtaaataaatggcatccgttactttgcctttagcattcggcagattatcgagaaagtaattaatctgtcgcagatctccccagtcgccggttccccaaccaccttgttgggtatcatcccacgtgtcaccgatcaaaaaagtagtggacgaacgggttgcacaaaagtctgcatactggtcgccaccccaggctattgtttcttcgccgggcaggaaactttgcagaaaaccatttgtataaagccgtaagtccgattccgactccagaaagccttcggaagaaaaactgttctcgggctcacaattcagaaaactatcacaagaggtcagagccaaagcatacagacctatcaaccaatattttttcatactcatcttctgtgttaaaaggttacattgataccgattgtataactgctcaaaataggataaccatatccgtctccatcagtatcggcagtagaacggaaatctgcatcaccggcactgataccttcggggtcatacattttagtatgcttgttcagcggtgtccatgtcaacaggttctcaccggcaaggtaaatcttcaaatcctgcaagtgcagtttatcgcaaaacttcttattaaaagtataatctatctgaagattcttcagacggacataagctatattctgtaaatagcggttattggcctggatacccaacgcctttgtagagccatttgccagatagccacggtagcggggccaataagcatcggtattctggttttcttctgtccatacattatttccggtatgttccttcagcatatagctgtaaggacggtcatattgcccccagaagaaagctgactcgcgatgcggataccagtttcgcttgcctacaccttgaaagaaagcactaataccaataccattccaattggcactcaaattgagaccgaactgatagcgaggcgtagtatttccgataaccttcaggtcaccgtgatcatccaatgtattctgaccattatccaccgtaccacttttatcgagatcggcaaatttcagatcacccggtttcagaatattcgtagcggatacttttagtttagactgatctgcatgagcatctatttcagcctgatctttaaataatccttcgatatgatatccccagatagtaccgatttcctgtccctcataataagtggagagtagtttcgtaggattattgaatttagtaacccaggtacgactatcccacaacatagcttttacactgtaattaaatggcttattagccagtgtaaaattgtcacgccacatgaccgaaagttcccagcccttggttttcatctctgcattgttacctttaggcgtagcggctcccagtacggcaggcaaggtaggacctactgtatacatatccgttgtatagcgttgatagtagtcgaacaccatcgacaaacggttagatagcatatcgacatccagaccaatatcataagttgtcgatttctcccaggtcagactgttgggaacgatattcggagtagtggcatacgtctgcaatgcatcacccagaataacagatgttttcttaatgggaattgtagaaagatagaggtaagggcttacattaccgttgcccagactacctacggaagcacggactttcaggttatccagccaattgcgagtagatttcataaaaggctcttcagaaatacgccagcccagtgatccggaagggaagaacccccactgctgattctcgggaaatttggaagaggcatcataacgtccacttacttctgccaggtaacgactcttataattgtagttcagacgatagaggaaacctacataagcccactcatttccgccttgtcccgtagtataataatcaccatccataagagcaaaactcggcttagtggcactaatcaggccacggcggtaagtttgtatcgttttataatcctggtgctcaagattccaacccaacagtacattcaggtaatgattggaattagaaaatttaggaatatagttaccggtaatattgcttgagagatattccttgttataatccatattttccagagaactgaatgtgttacgggttcccattatttccggtcccgtatagtaattgtactggttctcggctcttagacgggtggacttgctgctgtaataagtaaagtcacctttgaagatcaattgctgttttataggtgtatacgttaaggtcgtcgtattgcgtacatccagtttattgtccttttgccaggaagtcccttctacaaaacctgcccatccgatatatacggctgcctcggtccaagtaccgtcagggttcttctccatagtcaccggatatccctgatgttgtgcctgacgggttatattctgacggtcgtacatcaccatgggctggtgggaacggaaaatcatgacatccgtattattctccaacaaaagagatttattgatttgtatttctccttttgaacggatattatactgcgtatacttttcgtctccggcattgtaaatgccatcctgattgtagtagcgtcctgacacataataccgggcacgctcatttcccccactaatgctgacattatgttcagtggaatagttctgatctttataaataatatccagccagttggtattaccaaagtattcatattcccccttatcattgacacgcactttatccagagaaggatcggcatcgcgtcttaccaattcattataccagtcggtagagtacttaaatacattattgatacctcccggaggcgcctcctgaccttccagataagccgtataccagccatcggtccactgcaaaccattactaacgataccatcttctgtcttcaccgtacgctgatgcatggagaaacttccgttataattgattttcgtctttccggcagtagcgttcttggtagttaccaatatcactccgaaagcaccacgcgcaccatagatagcagccgaagaagcgtccttcagtacagatacactttccacatctgcgggattcaccgagttgagatccccctccaccccgtttatcaacacaagggcactaccacccgcaccaatacttcctgttccacgaagattaatggatggcgtacgcgaaggtttaccgtcactgaatgtaatgttcagccccggtaccataccttgcaacgaacgagaaatgttactgttgccgcgctctgcaatctgcttgctatcaatctggtccacagcaccaaccagatttactttctttgccgtaccgtaacctacgaccaccacttcctgcaactgttgcgcatcttccttaagtacaatctgcatttgttggtcatcttttaccagtacctctgtttctgagtatccgatataactcagtaacagttttttccctttctctacatccaagacaaaatgtccgtttacatcagtgattgttcccgactttccgtctttgattctcaccgtaacgccggccagcggttctcctgaggcatcttttaccacacctttcagtggaacaagattagcagcaagcaacattcctccccctaaaacaaaggtgagggcaacggcaaaacgcctgcttaccaaactccattctaaaaaacatcttttcactttcatactgttcaattgataaaataaatcaagaatcccttcggggtgcaaaggtggaggctacagatttcaactacgctacaagaaagtgaagttaggatgtcaatagaatgacgagatttcaacagctcttatgaaagacacacgatagtagacacaaaaagccgtttcttcacagaaacggctttcttctataggtcaacataaagttaaacctaattcgtcagagagaattctaatgatctgcttttattttctttattgatagacctttaaagatatcataataaccaagattattattgttaccaaacgttggagacttagaagcaaaaacataaactcctatagcatcgataaaactctttatagtccctgtttctcctgtaaaagaaaatccctttttatccttgaaagggaagaaaggcattaattcttcatcgtctacatcaagctcagctatagctggataggacaatgatgtgtccgcatgtacatagcccgcttcacttctcacgatggtataaagataccatttttgtgattctataaatccaagatattgtccgttaagggcactcaattggtaggtttcaccatcgaatttcagaggcaatacaactcctcttatagaactcaaaccgtctgcatagaaaaccgcttcattttcttcatcttgcaaaagttctattttcacagtttcactcacccaatcatccccttcaccaaaagtagaataagtagcttcataagtacctgcaatatcattcacaccaaactgaacaaaagttatttctttagttcctttttggctcttgaatattacagttcctttacgggcatttcctgtcgtattctctgttaaagtaaaattataaccttcttttactttctcaccggttatccaagccggcatatcaacagtatagtcataatcactcttcacagggatcgttatagtactttcttcgtcagacagtccgtaaagatcatctccgttcacataccatactccaccggcttgtgacacaggtacacgcaccttgctatctaaggtattcgatatttcaacaaccgcatttcggcctacaagaccagtataagtaggaaccgccactgtcacgacattaccgttaacagtaaccgtacaccaatcctgattgcttaccgccgtaatggcagaattactttgtacctctatagtgccggtagttgcgatggcagtgaaagatacatcagactttatcacctgtaatgatgcaacggcagaatcatcatcatctgaacaggacgttaccaagaacaggcatcctatcagcatccataaaatatttatttttttcatacgctaaacagtttattttttagttttcaaaagttttcgaaccgaagcattaataattgtatcagagagataaataaagaaagttactcccaatgcaatacacaacgattccgcaaaagaatgtttactatcaaagaatatcagtaacaacataataagtgccgccactattatatacttcagtatttgcttcaagacagaaatttcatcagatttcttagcaatcaccaaatttgccggtgaataacacaacaaatctattaaaataaccattaacaatgcttgtggaaatgaatatccgtcttctccatacataaagaaagggattccaactaaaagcactataatagaggccactacagataaaattactttcctattcataacagtatcttccttaattaataaatcattgcttggttaaactaaaccagaccttattatcaactgtactaaccaacttagtagtagtaggagtttgatcatcatcaaattccacagtatagggactatgcgcgtcaacatactctatgataggatctaagaatacataaaaatcatagttaatgccaggagcagtggattgaagagagatttttttgctcgcctcatctataatagacattttatatccatatgcaacatcccaaacctgtaatcctaaccaattagattcccaacccatacaatatgggtttgtatcatttcccggataggcagaatttgctccaatataccaaccaataaactcttcatactgggtcgatttatttattgcataagcattactgaataaatccatcagttccttgtccatatctccagtccccgcagctatatcaaaagaaaggtaccattgagaagttgtcccacagaactgctccaaagctgtaggataaggaaaagaaacatctgcatccgtagcttttatagcccccgtagcatcgtcatagactaagcgttgaaaagtaattccatttaccgtaagcggttcatagagatttattccatccggagtataaatatatgccatgtctatattttccaaggagctgtcttctttcatatccgtataagaaagtaatttgcccaccatgctgacagtatattcttttcctcccactaccattttcatgcgaggtacggctgccattttttcctgcatatccagtaccttttgcatatagctaccagcactctcagtcagtttagtcatgaccatcttattgccatatttctttccttttagtacaatgcggtcttcactcacttccataaacacaaactcatagtcgctggcatatccgtcaacatcactggaccctcttggttctgaaaagaaatggaacaacaaattgtaagtatcgaatgtaagaagtgcactttgttcggagataacccggtaatacgaagtcactaccgtaccagccggccatttatcaccgctgctggaatttaaagataattccgaagtcatatcaaccttaccattatcgaactttgcagtataagtatatccacccatcgaacggtcgctcggatagaactccattacccaaccctgcggatcatcctgaagaatagctttatatttagtcaaagcttcattcatcctttcagctgccgacttatcaaataagtcctcttcttcacttacacatgagttgaagcagaatccggcgagcaataaaaatagaatataatatatttttttcatcatttctcatatttatttaagtgtttccaaatcaatttctccggtcacaacatcactcatacgacgctgaacaacgtcacggagttcgtccatatcaatgttccatgctgtttgcatgtaattctttacaatcgtcaatttctgattgatgatttcagcacctttggttccggctgtttccatctgtttcgcccaatactcagccgtatttgtgatataaatagaagtaacttccgcaatatcttcacgaggttcgctcattgcataaggagaaatgaaaccacttgccaacgcatcttcatcagactccagataccagtcaccactcacataaagcccctcggaaatacggtcataatctggatcataactctttgtctggtgaaggatatgggcaaactcatgatgcatggtcttaaaatagtactcattcagaaaatctgcatctatcttcagattgtttacaagatataaagtaacctttaacccaccttccgcagtaccaagtaccatcgttccattgtcctcgtaggcagcggaacctaccaaatgaagaactttgggcacatactgacgcgtaaagtcgatacccgccacttcatcataggtttccagccatgcatacttcacgatatgcgccaacttcaccgatttatcataatcagcaggagccagagtataatcatgattagattcaatatcctccatatgatatttcaatgcgatattataaggcattgtatagttagcgaggatccatttatcaaaatcattttgttcacttgtcggctgatcttcaaaaatgctcttagggtccagatcatcttcgctacaacttgtaaagttcagcaatgaagccgctatgcctaatatatataaatatttcttcataatttttctttttaaaattaaccgattaattacgcggattagcttccaatcctgctgttattacgctttgcggtaactgaatagcccgacgtgaatcatccgctttcaattcatcgttcacagtaatttcattgttatatacagtacgacgataaatttccaaaccatatctcttaatatcaaaccaacgcaagccttcatgcaaggtcaatatacggcgtacatgcaaaattgcatgaataaggttttcttgtgtacccgattctaccgtaaaatcaggatgcagcgcctttttaggagtaggagctttcggagtataaaatttcatacccgtaccggttgcttctgaatattctccatacaatgcattgacagactctaccgttacagtattcgtggatttagtgaaagcatgtatccatgtatccaaatctgctgctgctttcgtatagtcttttttcattgtgtaggcttcagcacgattcagaattacctcatcagttgtgaaagctggaaacatcacatgagcattaccgatatcattcacaggatctgttatttcaaaatattcagccatctttcccattataactttgggaagtccctgataagacggtatgctgaaataaagcatggaataaccaccccagatagagattgtcttacaagtctccttattggctatcatatcattatgagtatatttttctcctaacccataaggtccgtgaattcttccccatgaagaactcgttgaatataataacagattagccttctcgcttacattgataaatgcagtggcacggatagagttattaggactcagtgctccgacagtagcccagtcccgcaacattgccgtcggattttctgtcagaaccaccgttgcatactgaatggccttatcatagtttgatttatcatcctttacataataaagataaaaacgtgttgcgaaagcatatccggcttttttattaaaatgatatttaggaacagaataaatagcatcattcaataaaggtagtccggcttctatatcagctgcaattttttcatagacttccgctacagttccgcgagtatattcaggagacacggtagtttccaaatgagtcatatatggaatgcctaaatccgtagtgctggttttcggactatacgccttactaaaaatattgaccagaacaaagtggttgtaggcacggcataacaatgcttctcccctctgaggatccaaagatgacgggtttcccatagtattaatagcatccagagctgcattagctgctgcaatcgccttatagcaatcattccacaaagaatatgggctgtcttcttccttatatgtcgcatccttccaagtagcggcttcttcctgcaacttgttatacgcagtccaggtgccaccattatcatccgcattatcagatgacatctcagccagcaatgcatagttagtttcaggataagcagataccagcatgctggttattttggcttccgtatccagttctgtacggttatccggcatttcatccaaaaagtcgtcacaggatgacaatgctacagtcatcgccaataccataaatggataatatatatatttcttttccataatctaattagcttttaatgttttaaataccaagtctcaaagtcaatgtaaactgcttaggtacaggagctgctacaccaccggaacggaagaactcaggatcttgtccgttcagtttatcatccgaatagatcaggaacaagttagtagcttgcaactttaaagaaagatcattaataaatattttctctaaccacttcttcgggaaatcataagaaactgatatttctttcatacgaataaaatcccctttagctatacgttccgtagaataattgtatgcgttataaagagtttttaagtgattatcagtatcgctctgccgcttcgttacaatcgttggtattgtggttatactctcttcacctgccagtacccaacgatttttaaactctttcggcatagaagtcagatccgtatattcgttactgaatacgggatccaggcgaataacattaccgaatgagtaagtgataaatacattcagtttaaaccctttgtaacggaatatatttccgaagctaccggtaatagtaggatcagtcggaccttcatattttagataatccagtttctgactttgaaaatcaatatcattaccatcactcgtcaagtttccattctgatcaataaaagtaggtaaaccatcttcattcaatcccttaaactgatacgagaataacccacgtaccggataacctttaagtgcaaatcctgtaccggaaaccacgtcaataacttctgcatccgattccaggtctgtaacttcattttttgcctgagagaagataaaatccgtagtccacccaaagtctttcgtttgaatatttcgtgtagaaagcgtaaattcaacaccatgtgatttcatggtagccacattagccagtttacgaatttgtcctccgacaccgggagtctgtatcacaccaatcaaatcatagttatcacgtttataccagtcaatagcaaagttgatgcgattgtccaggaatcccatatctgcaccaatattcaactcatgtttcttctcataagtcaggtcgtcatttgccaaatctataatctttagaccactttcctgaatgttggcaaacggacgataaggtttataactctttaataccatggtagagttagtaaccgtattcggccccggatctccggtcaaagaataagaagccttcaaagcaaagtgtgccaaagccggtttcaatgactcaaagaattcctcctcgtgcatattccatgctgctgatatattccatgtgggtaaccagcgtgcactacgactcttgcctaaacggttagtaccctcataacgataagtaccattcaccgtatatttaccctgataagaataagtagcgtttgtaaagaaagctgctgatctagaacgggtattagtcaatgaataatagtcagtaccctcttctatgctctttttaaagaactgataagtatagaacggaatttcgccctgcgtatattgcataccccaaccattaaagtaagtcttattacgatcggaagagtttgtctccataccggcaaaaagattcacaatatgtttttcgacaaatacatgattccaacttccagtagcgcggaagtcatatcccagcatcttatagttcgtacgttgataaatacctccttggggcaatacgctaataggtaatgcatatgggttatctggatcagtatacaagaaggggttacgatcacgtaccgtagcatcaggcatagcacgataagccatagcctggttagaatcatccgtaatgaggtgttcttgtgaagttgcagaatacttcacagctcccaatgctgaaaattccaaccccgtaataggtttccatttcaactccccctggaactttaaatctgccacatccagattcatatagttattatccaattcatgaaggatattgaaatcagcataattacgggtatacattgtcttcgaatccaatgcacgggaagtgttcaacgcatacgaatacgggttaatatcaaagtcacgcttcacttcaccatatacaggatccacactttggctcaaagtaccaggagccttttgtttcctataggctgccgaagatataagattaatggatagctgttttgaaatattatatgtagcattcagattagccgtatatctgtttacctcactatctttataccatcccggatcggccatagcacttaaagaggcatagaaagaagctttttccgtaccagatgaaagactgacagaatgattatgcatcacagaattactgaatagtgcatcaaaccaatctgtatttctgtactcagcctcctgcaaataatcattcattgcagtgtctgtgtgttccaaggcaaatgtaccggtcaccggattataagtattcatcaactgatacatcttaccatagacaccactttgagcagcacgataagtatccgagaaatttaaccagcctttctccttcatctctttgtaaactcccatctgttcctgtgaattcataatattgaagtcggcatatctcggagtcatacgcatggtaaattcaccggtataggaaatatgactttttccggcctgccctttcttggtagtaactacaatcacacctgccatggcacgtgcaccataaatagaagtcgcagatccatccttcaaaatttggaaactctcaatatcatttgcattcagacctgcaatggcagaactaatcaatgtaacggcgtcaccagaagacaactcatcggcacttacttccgtaacatcttccattatgataccatcaactacccacaacggtttagaactaccataaatagatgtagcaccacgaacacgtattttaggagctgtaccgaaagttccggaaacattttgtacagatacacctgccgcacgtccctccaacgaacggctaatatctgccaaaccatccaatttcacatcttcactggacaatttggtcgcagcacctgtaaaaagtcgtttatccatctttgtcataccggtaaccactacttcttccaaaacttcagcatccggtttcatcacgattttcatcgtcccgctttttatattcacctctatcgtctgcatgccgacgtaggttattctcagtatttttgccgtacccggcacattagtaagtgtaaacttaccatcgagatctgttaccgccccctggtttgtacctttaatcaaaacagatgcacctacaataggctgattgtcttcttcaaaaatgactagtcccgtcactgtttttggagtttgcgcaatcgccaagccaattccaataagtaggcaggctaatgataaaacaatttttttctccataagctctcttaaatatatgtgttaatactagaatctaccatgttctagcagaacttatgaaaagcaaattctcaacagttattttttattattcaaaatagcttgttcgttatgaaaaatttcatttgaatgtaatcaatgagattatatctaaaaaacaaactcatagtttacatttgcttttatgttaacattaatgcctttttctataaagcgatgctatttttatgttattaacaacaaaagaatctttattattcactaaaacaaagcatatttctatcattttgctttttaaagcaatcatataatcactatcttcttgattaaaaacagatataaatgtaatataaacacttaaccaaatacatattcaaacaatatgtatttgcaagtgttttagattttattttgtattttgctttgattttatagaatattacttaaatttgcagctgtggaacatgaataaacgactatgctttcagaggatatgatcaaaacacatttacgaaagaaagattaatgtcattcttcatctacacttcaaataaatatatagctcaaagtttgaaaagataataaaaatctatattcctgaaaaagtaacagaagtatcatgaaaacaacagctacggtagaagcaaatatttgctaatatcattgattagtacactttaaccaatctatcaagttctgctagaactccatcttttaatcaacattttagaaagacaagaagcacacaaaataggatatttaatttgaaactcttacctttgtccgctgattacatgaaacgacaatatgacagaacaggaagtcagaaggtatctacggaaaatgagcgagcaggattcgcaaactgctttccgggatttttatgatatgacgtatgaccgtctgttccgtattgctttttactacactcaccacgaagaatggtcgcaagagattgtgctcgatgttttcatgagactctgggaacaccgtaagcaattattagaaattaccaatatcgaagattactgtttcatactcgtaaagaatgcctctctcaactatatagaaaaagaggagcgccgccccaccctatcaacagaaaccctacatgaacactccgatcaagcagtatcacctgaagatactctgatcagcgaggaacttttttcccgctatgtaaaagctctcgaccggctaccggaacgttgccgtgaagtctttatccgcatccgcgaagaaaaacaaacctatgcacaagtagcagaagagttgggcatcagtacaaaaacggtggatgcgcaattgcagaaagcaaccattcgattgaaagaaatactgctctaataaacagtcagagtccatcatcttattttctctattatctgaggtatatcatcaattagcctttaacactttttatttctatcgccatagggaatttcttttttgctcctgtctttactcatgaactatataaactaaactaaattaaaacgacatgaaaagattttgcaaacaaatggcaggaaccgcagggcttctctttatccttgctgcatgcagtaacaacagttccagttatcccgaagagtatgtaggttttgagaaagccaccaaaaactattcgttcgacaaaaacaaagacacagaagagttcgacgtaaagattattgccgctgaaaagaaaaatgaggatagggaagttctcattaatggcataaacatgccgggtaaagcagctattttcagtattgaagacaagacggtcattatccctgccaagaagaaatcagccaatctacgagtgaagatctatccgaagagagtgacagacaaagctgaattccgcatcgtctgtaccccgaaggataaagaaggcaaaaagacacagatcactatccatctaagtccccaataatgggaactacaactccattctgtttcatcctatcactagctttttctcacgtgagcttggtacataaatgccttaaggccgtatgaaaactaagctttgctttattgtttttgtccttttgcccgtaacaaaacttcgtcccacagttgcgggctctacgttttccaattgagggctgtcggtcccacaactgcgggctacacagccctcaactgaaaaacgaggttttgcttatagcataatgacattaacattaaggctttaggagaaaaaggaaggagcatatcaagtttctcctctatcattcagctttctatataatgggattatgaagcctgactcctcaattcttacgaagtgataacttctacgatgaaaattcagtttaaaaggagatatttgcatgaatacaggcaaagtttgtataatacatattaaggacttgtgaattagtgaattacaaacataaaaacgctctttttttctatttttcggtgtaggatataactttcctgcaccttcctacaccacttcccacgccacctatctatttgataaccagataaaaatgatagcgggtgtaggatgtaggaaaaaaaagtaatttcggcatagggagtttttccgttttacctgtctttatagaaaagaagaagaacatggaacaagaatttgaaagaatactcgataaactcgcaacctccacccgttcgccgagaggaagattctcgaaagccaatagctggatacttcttgagaaacggttgccgcatctgcaacgccgcatcctttcattgcacacaatggctggtgcagccgctgtcgccgtgctttgtgtactgggctggtgggcatattatatgttcgccccggtaccattgcaaaccgtatccacattggcagaaacacgtaccgtaacactgcccgaccaaacagaaattgtactgaaccgctattcttctctgacttatcccgaacgtttcagaggaaaagaccggaaagtacagttacaaggagaagcttatttcgaagtcagcaaagatgcagcacatcctttcaaagtagaagccggagcaattatagtacaggttttaggtacacatttcaatgtcgaagcctatcccgaagatacacaagtgaaaacaaccttgttggaaggttccgtttctgtcagcctcatcggtaaagcagaagaaagcctgatactttcacccaatgaaagcgctatatataataaggataagaaaagtctgactctacataccgaaaataatgcatccgaagagattatctggagaaacggaacactgcttttcaaaagcattcctttacaagagattgtccgacaactttctaacgctttccacacagacattcgtattgaagacgctgacttacagaactatcgcatgacggctactttttctgctggcgaaacactggaagaaattctttcgctgctttgccgcaatcaaaagtttgaatacacaaaaactaatgacataataacaatcacacaaaaattaaactagaatgaaatcctctatctgttcaccccgcaccatcaggaaatttttcctggtgggagcggttctcctatcaacctgtacactacaaagtacgattgtatttgccacctgcgttctacagaagaccaatccttcacaaacgcgtttcagcatcagactgcaaaatgcgacactggaggagtttgtgaaacaagtggaacaaaaaaccgggtacagtttcatatacggagaagaagtacgtctgaatggacgcatcacactggccgtccgagaccttactattaacgaaattctccggaaagcttttgaaaaccaaccgataggtttcgaaatctccggaaaacatattttgctaaacaagcggcccgtgccgcagaaaaccgcaagccgtcggttcactatcagcggatacgtgacagacggggcgtcttccgagacgctgattggtgccaatatcctcgatagtcgtcagcgtgtgggcactgccaccaatcctttcggtttctatactcttactttgccggaaggagatgcggaattgattttttcgtatttagggtacgaaacccggcacagttcgttcccgctaaacaaagacaccgtgctcaatatccgcttggacagcaataatgaactggcggaagtgattgtcctttcggacaagaaagaagccggcatccaagccaccgccatgggagcgtatgaaattccgatggcacaaattcaacatactccagccgtacttggagaagctgatatattgaaaaccattcagttaatgccaggtgtacaagctggaacggaaggcttttcaggtttatatgtacgcggaggaggaccggaccagaacctgatattgctagacggtattccggtatataatgcagatcatcttctgggggtgttctccgtatttactcccgaagctataaaaaacactacactctacaagagttcctttcccgcccgttacggcggtcggctttcctctattgtcgatatacgcaccaacgacggagatatgcaccattaccacggtgcactcagtgtaggtacacttaccgacaaactgcattttgaaggacctatctggaaaggacacacttctttcagtcttagtgcacgtgccacgcacaccgccttcttcaaaaacctcatagtggataaagatgattattacgctgataaatacaactactacttttacgacatcaatgccaaggtgaaccataaattcaatgaccgcagccgcctcttcatcggtttctataaaggaaaggaccactaccactttgacaccaccgacagcaacaactactatcagaacaacgacgacactaaagtctattataaagatgacagccacctgaactggggaaacacgatagcctatggccgctggaattatgtattcaatagtaagttgttctgcaacaccactatttcctacaataactatctgatgaaattgaatcaggatgtggaagatacacgcacctaccgggggcaaatattagatcgctatagctatttatcccaattccgttcgggcatcagtgactggagtgcgcgcatggacttcgattttacacccgctccggaacatcacatcaagtttggagcagaatatatccaccatactttccgcccgggcatctccacttccaagactcaggaagtggaaaacggggagcaacaggaagaaacaatttatgccgccagcaataatcatgtactacgaggacaagaggtatcactctatgctgaagataatttcaacctgaacagccatctcagcctaaatgccggtataagggcatctctgttctctacacaaggaaagaactactgttcgattcaaccacgcctctctacacgctacaacttcggacagggattctccgccaaggcatcctatacatgcatggcacaatatgtacacttgctttcatccactcccttctctatgcccacggatctttgggtaccaattaccaaaaacatacgccccatgtatgccaatcaatactctcttggaggctattataccggtctggctggctgggagttctctatagagggatattataagcagatgcgtcacatactggaatatcaggatggcgtttcctttttcggcacttccactaattgggaggaaaaggtagaaatgggtgaaggacgttcctttggcctggaaatgatggtacaaaagactttgggaaagactaccggttggctggcatatacgttggcaaagaccgatcaccgtttcaaagatggtgccatcagccagggtaaatggtttccttataaatatgaccgccgccacaccatcagtctgtgtttgaatcataaattcagtgaacgtatcgacgtcggagcttcgtggatattcaataccgggggatgcatcacagtacctgaacgggagaccattatcatccgtcccgaaggcaatatagaatctgctccttatatttcccggcgcaacaactaccgcctgccagccagtcatcgcctaaacctgggtatcaacttcaacaagaaaaccaagcatggcatgcgtacttggaacatcagcctttataatgcctacaatgctatgaaccccaacctggtttacagcaaatgggaacaaggttacaatctgatttacaatgacttttacaacagcatatatcaaggaaacggtaatcaatacaactcagagaaaaagtcgaagactgttatcaagaaactgacgatattaccctgcataccctctgtgacttatacctataaattttaaaagccataccagattatgaaaacaagaattaaattacaccttattatatatatagctttcgccgggctctttatggcttgtgaaaatgaaatcccatataatcccggacaacaaaatccacagcttatcatgaatgccctgctcaatgccggacaaacagagaatctcgtttacctgcatcttagtgaaggaaacagcatcggccgcatcaatgaagcaacgctttccctctacgtaaacaataagcaggttgaatcccctcaagccatatctcccgaagaatactatggaaatatgcaaaatcagcttgacaaggggcaatatgaagcattactaaaaagtatgcgcttcaaaatattccgtctcaccgcccgcttacaacccggagataacattcgcctggaagccacagcggaaggcggaaagtatcatgtcagttcgcaagtaactgttccccgtcccctacaaagcctgcaagtggacacctgtaccgccctcatccgccaatggggtagcatgagagcccatcgtcaataccgcatcaccttagaggatctccctaacgaaaagaactattaccgtctggagatagtgaataacaaagacttccgctgcgttatctacacgcccaacgaagacgagaacggagactatataaaggatgaaaatggagattacatttacaccataacgaaagacacagttgtcaactatagatataccgaacttatcaaccgtgaagacgtgatcctgaccgacggacatgtcaccagctcggatgatgatgaaaatgcaatgtttcccaccaacattgaaaacaaatacagtatcttcacagataatcgtttcaccaattcatctgccacgctgaaagtttacaccccactttacgatgacaactatgatattctccaatcactgaattatacccgttgctacctgaaacaaaatatcaccgtgcgcgtgctcagtttgcctgaaacatattatcgctacctgaaagctttaaactgcatggatgacgaagattatgacgaagccctgatggaacctatcagcctgcccagcaatgtagaaggcggattgggctttgtaggtatttcatctgaaattcaatacaccatagatatgccggataaaaaatggggatggtggtaaaatccggataaatactatcattatgatcacccgtgttcgataactatattacattcatattacaaataaggtcttaaacaagcaaaataataccatataattgatctatatcaagaaatgctcccttaaactgcactttccttcttctttgcttttatgttataaaacatatttctatatttgcataggtaaaaagaaaaagctaagcgcttagagctgttttcaataggtattagatttttagagttagaattgtttttaggtataacaaattaaaagtaggtattatgaaacgtttaggattaacattaataacagcagtctgtctgactgctacgacatttgcagcaggaaatcaacctacaactgcaaaatgggatggtaacatcaacgtaaccaagttgagtaaatatttaaaattgtcggctggccagcatgaagaagtagcaaacatctgcgaatacttctctacacagatgggacgtgccacaactgcaaagaaggaccaggaaaagaaactccacaatgcagtgtacggaaacttgaagttgatgaagaaaacgcttactgacaagcaatacgctgattatgcgaaagtattgaatgtcactttgcagaataaaggtatcgaagtgaaataataagagagggcactgaacatcacgttttgtgccctctttcctttatcaacactattcaagtgtcgactccctaaccaatatatatatttcatttacaaacaatatctgtcttgtagctcctttttatatttcttagagaccagcagctcatctacattctcaaatggcggatacaacacacatttaccatccttgataatcatcagataatcaatattgattatgaaagactgatgaatctgcacaaaacaaggagcatatctcactatctgatcggccgtggtactcttcttcagaggtaacggcgtttgtccactcaatactgcctcccactgtttccgttcagagcaataccggaaatatccaatttcggcaggtcgtaatgcccgcatgtcatttgtcggagtaaacaccataaatgtctgactagtgtttgctaatgccgcaggaaaaaatgcagctttccgttctaattctattctttccataaatcgggaaattataagttccagatctttgtcctcaaaaggtttcaacaaataatcaaaagcagattgacgaatggctgacatcatgtatttatcgtatgcagtataaaaaacgactttcatgccccaagtcagagattcgcgaatactatccaacaaatccatccccctcatatcaggtagctctacatctaaaaagagcaaatcgggacgcactttagctatcagtttcttcccggatactccattgcgtgcagtaccttctaaatgaaagttttcaaatttctgtaacccgaataccagattatccaaggacaactcatcgtcatctactattgcaaccttatacctgtccatacctctcttgtttctgcgaaattaaagaactgaaagcaatttaaaaaatcagaatatgtcatttttagaatattcgatcaaaacaacggatatccaatcaaaattgaggattattcgaaaatcattaaactgaataatcataattcaacggtaaatgaaaacttacttcacatccggtctcgccatccggcaaaggaatattgtgtaccgaagtttcaatcatttccttattcttagcattcaaaatctgaatagtttgcatgattaccttcattccggtccctgtccctctgttagcactgttcagtttgaacccgcccccgttatccgtaatccggacacaaatataagtaccggaacgatgaacatcaatccaaaggcgccgttcaccttctttaccctgaagagcgtgcttgatggcattctccaccggtatctgtattaacatggaaggcagaagcaactgattggtgtctacatcttcaccaacttcaatagtcaccttaaattccggtcccaaagaacggcgttgaagatcaatgtaggtttgcacaaaacctaattcttcttttaaggtaacacacatttgctcagctaattccaaattccgtcgcattagtttcaccaatgaggaaagctcttttttattctccccgtcccgactgcccatttcctggttcagcacattaaaaataaaatgcggtgacattctgttacgtatattctccaaacgtaaagaagatatggtacgctgactttgcgcgagcagaagagcccgtcttttcttttcatacagatagatgaaacaagcaataaccaataccaaaacgcaaactccaatccagaagaaacgtccctcgtgcaactttaacatctctaccttctgctgctcaatcaatatgttctttgccaacagtgtagagtcctgttgatatctcaatgacatatcggctgtacgcattcttacatgttcattacggatagaatcgtccagccggctgttttctttctgataaaagaaagcatttttataatctgccgtcttctcgtaaaactcctgcaaatacttattacgaatatgcagcatgtccggctctatatgattcggattggtagccttacttagcagattccttacggttgccatatcatttcgccccagagccagaccgatgcgttgggtatcaatataataaagcgctcctgccgcccctattttccgaaaaaagggttggcattcattgatatatttagccgctgagtcaggttcattcatttgcagatagacatcccccagattcaccatgcacaggtttttctcaaagcccatatcgggatgagaaaccgccagcgagaaacctttcttgaaatattttaaagcttccggataatcctcacgataataatatgaattaccacgattattcaaatagatatatttctcgtaaggaagcattttatcataaaacatccctgccagattatagtaatagtcgcactgatcaaaatcgtgtaaagccatatacacctgagccagcccataataaacaggatgacgacgcccctccgatattcctaaagaatctccgatttgcagcgctttacgataccaaaatgcacttacgtcatattttccctgccggctgcatgcatcagccagattgataagaatatccgggactgattctgtcttcattccctgtaaacgttgtttgtaagaatctgtaaagcagacaatagccgaatccatagcgcctacacgcacataaatattaccttttgtattcagatattccgagcgtaaatcagcaagatagggtgaagattgttcacgggcacaaaagtcttctatccgttttattaaatagcgggctgagtccacatccgaagtgaacatatacgtttttaatactatagcagagtagtaataccattccagactatcagtcgacatctccatcttttgctttgccagcgcacgtatctgttgtggatgagtggtcaaagagtctgtaaccgaacgataaaaagagtcgtattttttttcccaagaggaatgctgctcagactgtttacacgaaacagctaagaatagtagtaagagaaccggaagagaagttctccacagaattttgccatatatcgtgttcatagctattgacatttatataaagaataaagatatccttcatgcattgctacaaatataatagtttttcccatttagtacaattttaagaccacttatccgctaagatatttatttatcctgtttttacttattatataatttgggtatcacaaatacttattttaactttgcatgaacaaattgaagtaatcattaacagtaacccacaaattacgagacacaatgagaaagcttttacttttggggatttgtatctcctttcttctccccacaactatgcaggcgcaatacttgcgttcatcctattttatggaaggtagcagtacccgcattcagttaaatccggcgttgcaacccaaacgtggttatgtcaatctccccggcatcggttccgtgaatgccgaagtagccactaactcacttggtatacaagatgtcatcgacgttttcgattccgacggtgaattttataacaacgacaagttctacaatcgcctgaaaggaatgaatgaagtgaatatcagtgcgaatacagatgttatatctttcggattctataaaggaaaaggtttctggtcattcaatgtaggggcacgggctgatgtggacgccactattcctaaaaccatgttcgactacctgcgcgcaacagacgctgataatttcagctggagcggtgagagttttgacatccgcaatgaaaaactacgtttgaacgcttacatagaagtcggagcaggatattcacgtgccatcaacgagcgcttaaccgtaggcggtaaagccaaattactattaggtgcaggaaacataaacctgaatatcaaccagctctacatgtatggaaaggatgctggcatcgactcggaattccaactaaaaacggatgcatatctggaagcttccgcaaaaggacttgatctggaagaagaaaatggatacatcactgacctggattacaatagttttggcatcagtggttatggagcaggtatcgatttaggagcaagctatcaggtgatgaagaatctgactgtttctgccgccattcttgacttgggattcatttcctggggcaaatcaagtactcaaatagctgaatcagataagaatactactattgataaaaataactatagcgaatcatccgatgtgctggactttgatttattcggtttgaagaagaaggaaaacaaatcacgcaccacctccttatcaccgactatggttatcggaggtgaatacggattactgaacaacaaactgggattaggattattatcaacaacccgtttcggccagttaaaaacgtattctgaattgacattctccgccaattatcgtcccaatactttgattaatactacgttgagctattccatgttacaaggtggcgaaacattcggtattgctttcaagataggtcctttgatgctgggtactgactatatgtattttggaaataactccaaacatgtgaatgcctttatcggactttctattcctttgggaaagaaaatataatagctaggagttacaggctacaagctacgagtgctatgcagaataatagcgcagcaacttgtagcttgtagcttttgtggcttgtaactatttaatcgttatcatcgttgccccgaaaccatattcctggaaagaggcatcctgatgccggaaagtaggatatttacgtttcagttcatccagcaacgctttacgaagtacaccgtcaccttttccgtggataaagacaatacgctgttcacgtttattcttatactgttccagcacttcacggaatttatccagctgataattcagtatctcactgttgctcattccatgagtatcatccagcaactcaccaatatgaaggtctatctcaataatgccactttgtccgccacgtttcacaatcggctgagatttgggtttgtctaccactgttttcttaagcaaagctgattgcaattcttcagcagaaacatacacttgtttagtgggaacatcatcctttactatatcgtaaatcaatgcaggtgtttcaaagaactccgactcctggaatgtatgcaatttatagaacttcaccgtatcaatacggagttccacgcttactgccggcttcatagcaaacgaacgcccttccttaaaagcaataaattgcacagctacgtgttcacgatcattcaattctgctttttcaaattcttccagcaagaattttgtattcggctctactactccattggaacggacttcccatgcttttccttcggcacagagataggtataatacaaataatagttactgtcattcaccagataagcttcaaaaggagtcgtgctgactgctttgatatcttccggaacgaaagccagaaaaacattcaacacatccccaccacgcatttccggctgacgaaaagcagaaacttgaggcttagacaaatgtcccatttctttttcttcatgtacaggatgggaaatagaagatcgcaccggcttctcttctactttcttcggagtagctttcggcaccggtctcgtcatattataatcatccgtatcaatcaccacacactcacgtatgggcatcgggatatcaaatccatcggcatcttctaccagcacaatatcctttccccgaaatcccgtcacaataccacccccgatctcattcaggaagcgtactttatcacctattttcatcttctttctatttaagtatttgacgaattagaatttacgattgaagttcgaaagcccaatcgctctacaaagatacggcaactcaataaaaaaagatagaaaaaagagaataaatatccgtacctttgcagcccgtaaagaagtttatcatgaaagaagatccaaaacatatccgtatcagtgaatttaactatccgttaccggatgaacgtatcgcaaaattccctctaccagtgcgcgatcagtccaaactcctggtctaccgccatggtgaagtatccgaagaccgctttacttcacttccatcctatctcccgacgggaagtctgatgatattcaataatacaaaagtgatacaggcacgcctgcacttccgtaaagaaaccggcgctctcattgaagtcttttgtctggaaccgattgaaccgaacgattatgtgcttaatttccagcaaaccgaacatgccgcctggctttgtatgatcggtaatctgaaaaaatggaaagaaggtacgctgaaacgggaaatgactgtaaaagagcaaccgattactttgactgctacccgtggtgaatgccacggcaccagccattgggtagatttccgctgggataatccggagataacttttgctgatatccttgaagtattcggtgaacttcccattccgccttatctgaatcgggatacacaagaaagtgataaagaaacttatcagactgtctattctaaaataaaaggttcagtagccgctccgaccgccgggttgcactttactccccgtgtattgaacgcattaaaagaaaaaggagtagatttggaggaattgacattgcacgtaggcgctggaactttcaaacctgtaaagagcgcagaaatcgaaggacatgagatgcataccgaatatatatctgtttctcgcgggacaattgaaaatctgattgcccacaacggaaaagcaattgccgtaggtactacctccgtacgaacactggaaagtctctatcatatcggtgtcacccttctgaaaaatccgaatgcaacagaagaagaacttcatgttcatcaatggcagccttatgagacagctgaagagactgcaagtatcacatctgtaaaagcgttgcaggccattctcgattacttgaaccgccatgatatggaagcgttgcacaccagtacgcaaattattattgcaccgggctacgactacaagattgtaaataccatggtcactaatttccatcaaccacaaagtaccttactattactcgtctccgcctttgtaaaaggcaattggcgaaacatatatgactttgcattaaaccatgatttccgttttctaagttatggggattcttcattattaataccgtaaaattatgaatagcgataataaccaggaaatgtttcctcttgtcgatgaacagggaaatattacaggcgccgctacccgtggcgaatgtcacaatggcagcaaactattgcatccggtaattcaccttcatgttttcaattccaaaggtgaattgtatatgcagaaacgtcccgaatggaaagatatccaaccggggaagtgggatacatccgtaggaggacatgtggatttgggcgaaagcgtagagatggctctgaagcgcgaagtgcgcgaagaactgggcatcacggactttacgcctgaaacggttacgcattatgtattcgagtccgcacgcgaaaaagaactcgtctttgtgcacaagaccatatacgatggtgagatactccccagtgatgagctggatggcggacgtttctggacgatagaagaaattaaagagaatttaggcaaagggatattcactccaaactttgaaggggagattgacaaagtactctcattaaaataaaaagaccgcccttgcggaaacggatgatgtgcccggggtaaacagaccatctgttcctgaaacacaaatgggagaccaaagcctcccatttgttgaatatttataaatctgctcttgacagcttttacttcgccagatcttcaattaccttcataatcttctgcccgatttcttctgcttcttccggtgtggaagcttcgctatacacgcgaataatcggttcggtgttactcttgcgcaagtgtacccacttatcagcaaaatctattttcactccatcgatgtcattgatttcttcatccttataaagctctttcactttagccagaatagcatccacatccgtttcaggagtcaggtctacacggttctttgccatgaagtaagacgggtaagttgcacgaagttcactcactttcttaccctcatgtgccagatggctcaggaacaaagcaatacccaccaatgcatcgcgaccgtaatgactttccggataaataactccaccattgccttcaccaccgattacagcgcctacttccttcattttagtggttacgttcacttcgcccacagcagaagcaaagtattccttaccatacttacgggttacatcgcgcaacgcacgtgtagaactcaagttagaaaccgtattgcccggagtatgcttcaacacatagtcagccacacttaccagcgtatattcttcaccatacatctttccatcttcgcaaatcattgccagacggtccacgtcagggtcaacaacaaaagccacatccgctttaccacccttcatcaggttcattatgtcacccaggttcttttcaagcggttcaggattgtgttggaagtcacctgtcggctcacagtagagcttctctatatgctgcacacccagttgtttcaacaattccggcagaataataccacccaccgagtttacacagtcaatagccacgcggaaattcgcttttctgatagcttctacatctaccaggttgagcgccagcacactatctatatgtttttgattataagtcaaatccttgcgatacgagcccagatggtctacatcagcaaattcaaattcttctgcctcagcaatacgaagtacttcattgccttcggctgcattcagaaattcgccacgttcattcagcaatttcagagcgttccattgtttggggttgtgcgatgctgtcaggataataccgccactggcaccttccatggttacagccaattcagtagttggagtagaagccagatcaatgtcgattacatcccagcccatacccatcagagtacctactactacattcttcaccatttcacccgaaatacgggcgtcgcgtcctactacaattttgttactttttaccgtgcacgttttgcgaataagtgtggcatacgctgatgtgaatttcacaatgtcaagcggattcaagcccacacccgctcctccgccaatggttccgcggattccagagatagatttgattagagtcattaggtaatgatttaaagattgttggttatactataattatttatagatttgatatttctgaatataataataataagggtatacagattgcatagccgagctatgtcccattttagaaggaacaatcagtttaacgcatgcgccatcacgcacatacgccaacggcaccaaccaaccggcaggcacagaagttccataataagagagcataaatccttgtgtaaactgaccggcaatagaagagcttgttactctatagttaaattcatcgactacttctgcataatccagattggacacagttaccactttatccataaggctatattccgagaagcgaaccagaatctgatcattcgcctttaccgtatcggccaaattagtggaacccttatctatgatctgcatatatacaccactggcaagctgtacatattcattcttgttcacatccgtagtcgagtcgtttctgtaaaattcagtctgagatataacagtgatactactgtcccgtataaatgcctttatagcatctttttcgtcctccagcatttctgcataagtcttggtattatcacaagcctggaaagccaatccacatgccagcaaggacaaaaagaataatgtaagtttcttcattatctgttatttagtaattccgtacaaaagtattcgatttcgttgaaagttgaaagctctacgaggaaagttcgtatcttttaacctttgtgcccctctttttttatcctttcgcattcagtaaaggcttaaacttctctaaagcacgctccaaaactttctttgcttcatctattgtaccatagaattcaccaccggaagcattcaagtgtccacctccattgaagaattcggcagccaattgattacagggaaatgtacctaccgaacgcaacgaaactttaatcattggcttctccgtatcttcacgtaagaaacaggaaaataccacatcctttatactcagaggaatatttacaaatccttcactgtcaccccggatataatcaaagcgtccctgttcgtttctggtcaacgaaatcaaggctgcatgataatcaggatacaccttcatttgcgaaagcacatatcccatcaaccgcaaacggctctcagagtaagtattatagactttcctgtaaatatcatctttatcgatgcccttggaaagcaactcgctgatgataaaatagatttcccggttgttggaattataggtaaagccacccgtatcagtcatcataccggtataaatacactctgctcctgctttggtaatttcattgaaataacccatacggcatatcagacggaacaccagttcggaagtggaagatatattaggatgtgaaattgtaatatcacaaaattcttcgggatacagatgatggtctatcaatatttttttcccttttgcagcctttacggcatctgccattgcatcaatacgactcaaagcgttgaaatccagacaacagattatttcggcctcagatatcagcttatcggcaaattctttgtagtgatcgtaaagtaacacatctttgctgcccggcatccatctcagaaaatcggggaaggcattcggcacaatgacatttaccgttttatcttgtgaattcaggaagtgccacaatcccaatgaagagcctatggcgtcgccgtccggcgctacatgggcaacaataacaattctctccgcatgccccatccacctggcaaaacggtctatcttagcttgttcgattactttagtcaacatacgcttaatctatgatttacaaacagacggctggagtgcccccattcatctataacaatttgaagcgacaaaagtacgaaaaagttcgagagttgagggaaagtagtgcaggttttatttagtccttgcccacagccttatttcccggagcttttttcatgctcttcgtaaccggcaagattgtatagaacagggatagtactgtttccaacacgatagataccgaatttaaaataataaccttcttcgtcattgcgccctattaatatctcttccttatttacaatatgcctcttaacttcttttccagcctgctgataggacatgatcacatccagaagaccgggcttcagaatggtttctttctctttcccgtacagagtccagtcaatatccacccggaaggttatccaacaatctttcggaaaggaatcaaacggcattttgtaggctattgtcgaagctttataagtggaggttacgggcttcataatctctgccttgtccgggtttacattacaacggtcggttttatcggtcagccatttgcggtccgagttagctttaatatagaaatagccttgtgaaaagccgaaagcaagaggtggatagccaccttgctcaatcagccagccattaggttttccggctttatagattgtatctcctttggaattgattttagttattttgtcatgggctatattcttcttgaaaatcatcctcttttccaactcaaggaattcttcaacgctaagtctcatcactttaccgtcagggtcggaaacaagtgtacgactcggcataccatgccattgtgcaaagatggtagacacttccttatccaaagtccgcggaatgtaaacagagaatgtataactcatggatgagccttgcggacaacttcctttaccgtaatggtatacagtcttcattttctgtgcattaaggtattcagttgccggatagttacggaaatcattggcaacagcataacaataacacaattcggcacgacctttggtttctccctgggcatagccttccaaagtattgtcttcctgtttcagctcgaagcgataagaaggtttgccttggaaaggacgggaataatccaactgaatggtatggggtttatttgtaccgacggccacccaacgcccatcaataatctgatttgtacgggctgaatcagcctgcacatttacgcgttctttcaggggtgttaagttatctgactgtgtacagaccggacttactgttaccaaagacaaaagacaaagggggattaatactgcggttctcattctttaattgatatttaataatgtatacgaatcaagagttagatggagcttatttgaaggagttatcagcctgcaagcagactgataactccttcaactcctaattaggtagaggtaccattgccctgcggccatagtttaatttcaaacctttcttgtaggcttcggggccatgcagatctttaatatccatttcacccaggtttacaaggataccacgcgccataagtccggcatcttcattttcaagacgcggtaaattttcagcggcttctttcagttcagacaaaaacggacggatatagtcgcgcatttcagggtctaaagataaacattccaaagaggagtaacctattttcctgtccttttcttgagccggagtaataaggcgggcaataccttcctgtgctttacccagataaacaaccgcataagctgcctcggaagctatataaggattctcgtcttgcaagagtgccaataatgcttgcggacaagtattaatttgcttctctctggcaagatttgcatatcctactaccccccagaatctcatctccggcagagggctggcaatagctttctccaacatgggaagagaagctacagttgccgttcccgcaatttcgacaagctcataaagctcatccaagggatatttctctttgcgcactttctcataaagtatatgtccggtacgtgaatttgggaggaaaaagcccaaatcatgggtagtacgaatgtggtcggataatgcttgacgcattttatataaggtttccgcatactcaggaatagcggataaatcatgcaattcatccggatctttttcaaggtcaaacaacatttccgccggatgaggctcaaaagtctgcttccagtccggattggtattgtgacctcccagcaccagtttgtcccaagctttattggatggcattccccattgataataattacgcagagcaaactgacggtaaggaatataactacggatatacttgaagcgaccatccgtaacagcgcgtaccggcatgaaatgatgcagttggttggctgccaatgcaaactgtacttcacgcttttctttactggcgaacttgccgtaaagcgcctttccttgcatgttcttgggaggctttacacctgctaaactaagtacagtaggtcccagatcggtgaagttcaccaaaccattttctttaccttttgctccatttgccaggtgccgccatttaggaggaaagtaggctatcataggaactttcagtccgctttcgtacagataacctttaccacgcgccacgcaaccgccatggtcactgaaaaagaaaatgatggtattgtcttccaatcctctagtctctaaatctttcaggaagattcccaaccaagtatccacatcctgtaccgcttccagatgacctgcataatccgaccgcacttccggcaaatcgggcacataggaaggtaaagtaagttgttgtgggaaaataccctcttgagtataatccctgcgtccatcagtgtggaaagtacggatacgtcccatgtgtgaagttactgtgttatatacagcgaagaaaggctgatcctttccacgtttggtactattgtaagaagctttattgttacattcgtcccaacagcttttgttatctgtagtagagttataatgtgttttgctattgtttgtgcagtaatacccggcttcacgcaatctttgaggaaagaatatatcagccggagtatcataaggaaccgggtgtatatccattccgtaagttgatgaataacatccggtgataagagatgaacgagctgccgaactttgtggtgccacagaccatgcattcataaattgtatgccacgagctgccaagctgtctgcattaggcgtatgtacatcgccattgccatagcaaccaaattcataagcactagtatcttcgaaggttagccaaaggatattgggcctttcgttttttttgtcagctgcctcggtttgtgaggaatataaaccacaaaaagcagtacacataaataaaggtaagtgtctcataaaatagtatgtattaaggataataaattcttgaggctaaagtagggcgtttatgaataacaagcgttttcttatgtcgaaaagagtgctaatattgtttcaataagctatatttcgacaatattagcagtgattcaacaaaattacggttagtcatagacgaatgtggataagatattatataaaagaggtgaaaagactggaggcgaaactttacttttgaaataataatctaatcaaaaaaaacatgagaagcttaatcttagtactattactgttaaatgcattattcttatctgcccaagaggctaccaacaacaatctgtcattcgataattctttacgcactgaatcagaaaagttattaacggagtggatggacacattcctgacttatcaatgcgacaatttacatccgtctctcaatggtggtgtgctgtgccctgcctgtgcccgcatgcatgggcgcatcggagatgccgtactccccttaatgtatctggctgataaaacacacaaagagaaataccttcttgctgccaaacgcctgatggcctggatggaaaacgtgcatcttcccaatggctcgtggatgaacgatgtacatgtctccgactggaacggtacaacagtcttcgcttccatagctctttatgaagcattacattaccatgggcatttattagacgattctacccggaaccattggaaacaaagactgatagaagctggtgagttcatgctggcaactccttttatatacagccgcaaacgggaaggtatgcggaatatgaatgtgaactattcagcctcagccacctatgcattgtatgccattggagagatgtgcaaccggcctgattttcaaaaagaagcccgtcagatagctgccgatctaaaaaactttttcactgaaaacgatacttttctatatggtgaaggtcccaatataagttcaaagacaaaaaacggctgccttccggtagacctgctttataatgtagaagaatccttgccgaatatggtatattacgcccttatggcgaaagacactgatttactgactctcgttgaccgttcaatggctactcacctggagtttatgttacccgatggtgcctgggacaatagttggggaacccgtagttttaaatggacttattggggcggacgcaccagtgatggttttatgggaggctattatgcaatggctgcccaacatccggaatatttagaagcaatccatcgtaatatacaattactgaaaaagactacttccgaaggtctgctttatggtggcatgcattatcgggtttccgggattgccccatgcattcaccatacattcggtcacgccaaggcaatcacttcttttttagaacttcctcccctgaatatcacttcttcccaagagcttccgcgtgataaaacctatggtctgaaatatttcaaggatatccatacctggcttatctctcaaggcccctggcgtgctacattcaccggatatgatgcagaatataaaattaaaggtactcatccgatgggaggcgcactctctatgctatggcatacacaggcaggacctgtttttgccgctacaatgaaccaataccagttgattgaagcgcctaatatgcagagtaataaccgtaagtatatcatgggaggtacaccacggatcgagtttatgcaaaatgggaccatatatagcaatttggatgacctgaatacagatatcatctgtgatacagaaaagaacggctatcggtttaccgtgaatacccatttggtcgatataaatcaaaacgcacctgcccaaggagagattcctgtcacaatttactatacctacacccggcaaggtcttgaaataaacgtagaaaactgctatgacgctacatatctgatgctaccagtcatcgcatcacccgcagaagaggtaaaagtaactccccaaaaagcatctataaacaaggatggaggcactttatccatcacctgtacagccggacatatagaagtagcgccaaccgataaagatggacgaatattcaatccggttcctggattttcttttgtacctttgcgaataattcctaatagttcggaaaagaaaattcgtataaatattctttttcgctaatctattttgttaatttgcctcgtaattggatacgactatgaaaataatacaaactttgttagtacttttaggagggttatttccatttatactgaatgccggaacaacggaggatatttacttctctcacatcggtatggaagatggattatcacacagtaccatattcgcaattaatcaggataaagaagggaatttatggttcgccacgtacgacggtgtgaataagtacgatggttacaatttcactgtataccgccatgaatatacaaaccccaatagtattgccagtgacataacccgatgcatagccatcgatgattcggatcagatatgggtgggtacccgtgaaggcctatccttttataatcgtcgtaaaaactcattctccaattactactataagaagaatggcatcaatgtccccatcaacagcattgctcccattaaagagaactggctgatgctgggtacggcagaaggtattttacttttcgatatcaagaaagaatgcttcttaaacgatactttgccttccctgcatttgttgaaaccaaccgttttagtacgccagggcgaatacatttatataggtgccgaagatggagtatatacttacacattatcgggagggaaattggaaagattagtaagtatgcccgcagggatacgcatacatgccattttgtgtcagatgttcagccggatatggatggcaaccgaaggggatggactatttatgtacgatgccaaaaccaaggagttgaaaaactatcgttatgaaagtgagcagtccggtttaaattccaattatgtacgctcattggagctggatacggaaaatcgtttatgggtagggacttatagcggactgaatatctataaagaagctaccgacaatttctcttctataaaaagttccgagatacaggaaggaagtctgtcacaaaattctgtcagaagtatttttaaagattctcaaggcggcatgtggttaggaacttattggggcgggttgaactattaccatcctctttgtaatcgcttccagcgtatcaagcatgttccttttctgaattcacttagtaataatgtggtcagttgtattgtagaagacagtgaacataacctgtggattggaacaagtgatggcggattgaacttctatgattccacctcaaaattatacaagaactacttgtttaaaccaggatcattggatgtacctttcaaggatattaaaacagtgtatgtagacgaggaacatgataaagtatatgtgggagcccatgccggaggcatgatggccctccagcgcaaatcgggacaggtagaatacttcaatcgccagaacagtaacttacccagtaataatatctattctatcatctccgatgagaacggaggattatgggtcgcttcactggaacatctcctgcatttcgatatagacaagcgcaattttacaattgtagacaaagatcagaatgggcgtaaattacaacaatataaccgtttgttgtttcgcgattccaggagacgtatatgggtaggaggtgaaatgggggtatctgtttataatcagataggaacagatttcctggccaatacagatttccatatagacccgatactacagcaggcatttgtgaattgcttttatgaatctacatcgggatatatctggatcgggacacgtagcggacttttcgctatgaaagaaggaagtaaagagctattgcagtataccacggcagatggtttgccgagtaatgttatttatggcatcatggaagatgcttacgctcgtttgtggataagtaccaatcaaggtttgagttgcctgaatccggaaaatggaaagttccgtaactttactatattggacggtttacagggaaatcagtttaatgccggatcttattgtcgtcaagataacggttacatgttgttcgggggtgtcaacggcattacattattccgtccggaaacactgattgacaatccttatactcctaaaccggtaatcaacaagctgtttgtttacaataaggaagtccttcccaacgacgaaacgggaatattgagtgaaacggttgaatatgcagatcatatcaccctatcctcttctcagaattcattcgccatatcttttgtagtgtccaactatatcgccggcaaacacaacacttttgcttataaactggaagggtataatgacgagtggtacagacagaacgataccagtccggtttcgtactctaatttgccggcaggtgactatactttttatataaaagcagcgaacaatgacggtaaatggaatgaagaaccgactgtacttcatattcgtgtcctgcctgtttggtactgtacctggtgggcactttcattgtttgctctatctttcatgctagtggtatttggcattgtccgctatttctggttgcgtaaaagtatgcaggctgaaattcttatggaaagactggacaaggagaaacaggaagaaatcagccagatgaaaatccgtttttacgttaatatatcgcacgaattacgtactccgctcaccctgattgtagcaccactgcaagaattgctaagtcgcatatccggacattgggaacatgaacagttactgtatatacaaagaaataccaaccgcttgctgcatctcgtcaatcagttaatggattaccgacgggcagagttgggaatctttgaactaagactggtaagtgccaatgcctacaaaagagttttgaatagcttcatgaactatgaaagtttgtcgaagaaaaaagatatagactataatttctatacggaattgcaggacaaagaactgttattcgatgaaaactatctggatcttattgttaacaacttactgtcgaacgcttttaaatataccgaagaaggtgaaagtattacggtaaaactgtatcaggaagcaagtgatcttgtactgcaagttacagatacaggtatcggtattcccaaagaaaaacaggagaagatttttgagcgattctatcaagtggaaagcggacgtgaaggaagcggtattggtctttccctggtacaacggctggttgaattgcaccatggaagaattgagttggagagtgaacccggaaaaggttctactttctccatttaccttccgcaagataaatctgtatatagccgtgaagaactgcttggaggagaagagaacgcagacaatcaacgggtatactctacgaatgcgcacgatgtatatatcggtgatgaagaagaagccgatacagaaagcgaagaagatgagaatacaaataaacgaggaacactccttgtggtggaagacaataaagaattaaggcaatatctggtcaatggattgtccggcttattcaatatgctggaagctgaaaatgggcaaaaggcattagacattctgaaagagaaggaagttgacctgattgtaacggatgtcatgatgcccgtaatggatggtgccaaattatgtaagttggtaaaacaaaacttacgcacctgtcatattccaatatatatgctgtctgccaaagcagatattaaatatcaattggaaggtttacaggtaggagcagatgattacatagccaaacctttctcgatggcaatattgaaagcaaagattatgaacatgctgcgtacacgccaccgcatcttcgaacactattccaataccaccgaaatagaaccggagaaacttaccaataacacgatggatgaagaactgctcagaaaagcgattgcagtgattgaaaggaacatggacaatgtagaattttctacagagcaatttgcgcgtgagatgaatatgagccgttctaatctacatctgaaattaaaagcaataacaggaaagtcagctatcgactttatccacaagatacgctttaaccgcgcatgtcagcttttgcaggaaggaaaatacaatgtttcagaaatcagttttatggtaggctacaatactccttcttattttgcagcacgcttcaagaagtatataggttgtctgcctaccgaatatggaaagaaataagatatgaactataataagaaaatcgaatatgattaactataattagcatagttatgcaattatcgcacttaaagaggctcgtcggggctgcctgctcagccccttgccgcatggcgttccctccgcaggagctttatggcttctcaggcttgaacccatctacatagagtttttcttgagtgacaatagcaaaggcttgccttataagtttgttagcgactgcaatgagcgctacttttcctggcttgcctttagatcgtaaccggtcaaaacatgccttgcattcagtattacatcgtaaagatgcaaaagccgccacataaagttggctccgcaaggaagaatcaccgttacgattgatgtgacctttgacattgactgacgtaccggattgttggtaagtaggtgacaagcccaagtaccgggtgagttgtttggcattatcaaaataggtgaagcctcccgtagccataattagtgcggctgccagcgtaacaccaatacctttgactgaagtaagcaaatccatctgtttcttgtattcactttgcgccagagaagccaattcttcttccaactctttgatttgtttttcaagaaagatgattgtcctttcaattgttttcttgcatttaggatcaaagaatggaagtgcctccatggaacctttcaagttcccagttgctacgagttgtttcttgagctgacgtatgaccgtccgcttttgctttaagacaagaatagtatcactacgcaacttgtaaggtgccggctgcatcttctcaccatacatggcgattaagcgagcgtctatttcatcagtcttggtgatggagagcataacacgggcaaagtttttaatctttagagggttctcaagactgacagctatacccgcttctgaaagcaggtaaactagtaaggaactataattaccggttgcttccaaaacacagtgatgttccgctacagaaatggtttggataaactcatgaatacctttgatagtattcttgaaagagtttgtcctactacctttagcagaagaataagcaactacgaaagtcgctttgctgacatcaattccaacgtaagtcatggtcttaatattttatattaaacatctatacatcttgagccatcattgcaaatgcggggtcaaagcccattgaactatccggtttctgatgtaaaagtgtggggactgaacatatcttacgatctacatgatcaatgagcaatcggccttattccacactctgatgttgaaactttatgcaaaaatataatgattaaataatatacaatgagaaaatataagatgtggacactactcattgttctgtccttgttagcagcatgtaaacaaccccaatcattaaccccttctgtcagtgaagtcgcacaaattaaggcaaatggtacatccatccggcttttctgtttgacaaacaggaatggaatgacaatcaaagtcaccaactttgccgcctcgctaacgtccgtttccgtacccgacaaaaaggggaacttcgaacaagtagtactgggcttcgatagtttagaaagttacttgggaaagcatcctaaatttggtgccactgtaggcagatttgccaatagaatcaagcatggcgagttttgcctggataaccagatctttcaacttgaaaagaacagtaaaggaaattctgttcatggcggaagccggggattcaatactcaagtattcgaaacggataccttttatgtagtgaaagacacggcaatagttgtcttttcttataaaagcgctcaccttgaaggaggatttcccggcaatctgaatctgtcaatcgcttataaactgactgatcgcaatgaagtaatcctggattatacggcaaccacggatcagcctactgttgtaaatttcaccaatcacagctacttcaatctgaccggctgtaaagagcctgtactgaaccatctttatacattgcatgcggactcaattaccccggtagattcaacaggagtccctaccggcgagctgaaggcagttacaggaacggagtatgacttcagaactccacgaacagccgaaaaacaaatccgacggatgatgggaaaaacttatgatatcaattataaactaaataaacacccggattctttggaattagtagctacagtcaccgaacctgtatctggaagaatactaaaagcatacaccactgaacccgggatgcaattttatattccaagttccaacatggattatctgaatgggcatggcaatagaaagtacggtaaatactatggattctgcctcgaaatgcagcatttcccagactcccccaataagccccaatttccttctacagtattgcgacctggcgaaatctaccggcagacaacaatctataaatttgaaaattcaccagcaacgaaatgccacctccgtatcaagtccgtacctcctccgtactgagtccgtatctatgagtatggagatactacggagaaaatacggagatggtacggagatactacggaggaggtacggacatgatacggagatacctcaatggtctttcagcaatcaatcctgcatattatttctttattgaataaaggccccccctttcatagggctctgtggcgcacattttacacaaaaacattctaaggtgaacaatattagcatgcaaaaagcataaaattgggagtatcaaaaacaatactttcccacttttttttgcgcttgcagtaagtttgccgtcacaaaaatgatctctaaagttaaaccttagatttatttattatgttcaaattaaaagaatctattttattgtttttcctcgctttcgtcagtacgattgcatacgcgcaaagtctgacagttactggtaaggtagtcgatagcgaaggttatgaagttattggaggtagcgttattattaagggtgctgccggtattggaactgttactgacatagatggtcactattcgctgaaagtgaacgatgcatctaaagatgtattagttttttcgtatgtgggaatgactccccaggaagtgaaagtcaacaatcagagtgttattaatgtaacgttgcaggcagatgccgtactgctggacgaagttgtagccatcggttatgcaacagtaaaacgtaaagacctgaccggttctgttgcttcggttaatagcaaagaactttcgaaagttcctaccagtgatatcacacaagcccttgccggccgcatggcaggtgtgcaggttatgcagagtgaaggtgctcccggagcttccatttctgttcgggttcgtggtggtatttccattactcaaagtaacgaacctttgtatatcatcgacggtttccccagcgaagacggtatgtctacccttgacccggcggaaattgaaacaatcgacatcctgaaagatgcttctgctacagctatctacggtgcccgtggtgctaatggtgtagtcgttattactaccaagagcggtggtaaagacggaaaagcgactgttacatttgacagttatgtaggtttcaagaaaatagccaagaagctggatgtactttctacttatgaatttacgatgttggattatgaacgtcgcgtttacgacgctaccactccggacgactgggagaaagacatcaaaaagttcaccgaaatctacggcaactacagtgaccttgaaaaaaactatggcaatcgtaaagggctggactggcaagatgaaacattaggacgcacggcaattacacaaaactatcgtgtaggcgtttccggtggtactgataaattaaattataacctggcatattcttattatgacgaagagggtgccatggtatatagcggcaacaacaagcacaacatttcattcaacatgaatcataaagtgaatgaccgcttggacatcaccgcccgtatcagctacgaccaaatgaaaattaccggtatgggtacttctgaaggaggcgaccgtttcaataagatgcagcacattttgcagtaccgccccacagtaggtatcaacggaaccgatgacctgttattgggagatgaagaccctatcttcctggatgattcgggtaacgtaatgcagaaccccttactttctgcggcagaagagacgaatgatcgtgaatatcgtacattccaggctaacggtggctttactttgaaacttttcaaaggtctctctttccgtaataccacaggtatgcgttaccagacacggcgcaatgatgttttctacggagacaagtcaatcacagcaaaacgttcaagcatcaatggtagtattcaaaatctggagaccggtagcttccagacttcaaacgtattgaactataactggtcgggtaaaggtcatgacgtgactgccatggtaggtcaggaatatgtagaccgttggaaccgtaatttcaaagcagcagcatctaacttcccgaatgacgatataggtttggctgacctctcactgggtcttccgacagcagttcagtctgccgaaaactatgatgataaattgctctctttcttcgcccgtttcaactacggcttcaaagataaatacttgtttaccgcttcggttcgtgccgatggttcttccaaattcggtaagaataacaaatggggctattttcccgcattctcagcagcttggcgcctgggagaagaagagtttatcaagaacttgaatatcttctctgacttaaaagttcgtttgggctatggtatggcgggtaacaaccgtatcgacagttaccttagtctggctgtattgggatctgttacttatcccaatggagactccacccagcccggttatgtttccaagcagattcctaaccctgacttgaaatgggaagctaacaaaaccttcaactttggtcttgacttcggtttcttcaatcagcgtttaaccatttctcctgaattttacataaaccgcagtagcaatttgttgctaaacgccaaactgcctacttcatccggttacaacagcatggttatcaatgccggtgaaacagaaaacaaaggtattgacttaaccatcaactcaaccaatatcacgaataagaattttacctggaacacatccatcactctgtcacacaataagaattctgtaaagaaactgacgggagaagatgtgcagttgtgggaggctaacttcggttacagccagaatacgcacattatcggtgtgaaccaacctttgggacagatgtacggatacgtaacagatggtctgtaccaagtatctgactttgattacgatgcagcaactaaaacttacacactgaaagacggtgttccgtatgcaggcgaaaaaggtaatgtaaaaccgggtatgtggaagtttaagaatatagacggcagcaaagacaataaaattacagaagctgacaaaacagtcattggtaacgcttatccgaaaatttacggtggtatcaataacactttcacttacaaagatttcgatttgagtatattccttacctatagcatcggtaacgatgtattcaatgcaaccaaacttaccaataccaaaactgctttgcagaacaaaaacgttttggcagtagctgactctaagcaccgttgggtattggttaataaggcaggtgacttgattacagatccccaggagatggcagacatcaacaagggcaagactgtagccgccatttatgataacgaagcaggtgatacttacattcactcttgggctgtagaagacggttctttcctgaaactgagtaacattactttaggttacacattcccgaagaagatgatcagaaaagttggattgagcaaattacgtctttatgccacaggttctaacctgctgacctggaccaaatattccggcttcgatcctgaagtttctaccatgggaaatggtctgacaccgggcgttgactttggtgcttatcccagaagccgctcgtttgttttcggtattaatttagctttctaatgaacttcaaatggagaatacaatgaaaaaatataaagtgattgcgctaagcgcactgattgcagcaggattcacttcttgcgacctgacagaaaaacctacttcttactacgagaaggacacttattttgaaactatggaccaggcaaaaatgtcagtagtaggtatttacgattgtctggctatagacaagcattacggacaatttgaaatggcgatgcctgcttcggatgatacctattatattcaaggaacaggtacggataacacacgtcgtgatatttcccactacatggtgaaaccgaccaatacttggattgcatccatatgggaatacaaatacctgggtattgaccgcgctaatttttccattgccggtattgagaagatgacaggttacgaagaagattccaatttaaaggagttagtggctcaggcacgtttcctccgcgcatttctggctttcgatttaattaaatactggggagatgttccgttcaaaaccacttatactgccggatatgaagaagctttcaaaggtcgtgtaagccgtgaagaaatctatgaccagattatagttgacctgaatttcgctaaagagaacctgcaaaaagacaatgcttcactttcaccggaagttccttcacaaggtgctgcccatgcattgctgatgcgtgtttatctgcaacgtgccgggtacagcttgcagcaagacggtacattgacccgcccggacgaaactaaaagaaaagaatactttaacgctgtgattgccgaatggaccgccttccagaataaaggcaaccatggtttttatacaggtggttttgaacagttattcagaggttattcagaaggcatcttgaattcccaagagagtttgtgggaaattgctttcaatcctacaggagccggctacaaggacaatgcaggtacttgggctacttataacggaccagcggtagaggcaccgggcaaaaatgctcctgctgatgcatggggacgtgccaatgctttcttccgtgtactgccggcctggaaaaacttctttgaagaaggcgatgaacgcagagatgtaatggtatgtacctatcagtacaaatggaatgcaaatgccggcaaacatgataaggttgaaaacgcaaaactgactgactggtatcccggcaaatggcgcagagagtggatgcccggaggttttgtagatcccaacaacacaggagtgaactattgtccgcttcgcttcgccgacgttgtattgatggcagccgaagcttataatgaaacaggcaacaccccggaagcctggaaactgctgaatatggtacgtgaacgcgcaaaagctactccgataaccgatgccaactacagcagcctgatgaaagctccacaagtttatgatctcccatatattcaggatggagacgctgccggcaagttccgcacagctctttattgggaacgtggtttcgaattagctttcgaaggtcagcgcaaatatgacctgttgcgttggggtatcttgggcgacgcactgaagttcttccaagggaatatggacaaaacactgaaaggcaagtatgtagccggtgataaattcgtcaaaggccagcatgaacttttcccgataccactgggagaattacaggctaatccggctttgaataaccagaataatccgggttacgaataaatccgggaaatataaaattggcaattgtgatggagagagaatctgtttcatactctctccatctgctttacttataaaatgtattgtatgaaaagatttttattattttgttgtgcggttgctacattacaaggtttctccagctgttcatccagtcagcctaatacagagtatggctggttgaaaaatgcaatagacacctctgtacagcaattggaagaaacagtggccgatgtaggtgattcagtcttattaccccgttccatctggacaggatatgatatggattttctctgtcggcaattgcaaagagatcctgcaacctttaaggattctttgcggattaagccagtgaaggacgccataggaacccgtcgctattgctcttccatctatgattggacaagtggttttttccccggaaacttgtggtatgcgtatcagctgaccggtattgaaggtttaaagaacggtgccgtgaaattcacgaattatttgtatcccgtaaaagactataaaggtacacacgacatcggatttatgatgaattgcagttatggcaatgcatatcgcctggctcccgccgacagcgttcgtcaggcattggtgcaaacagctgataacttatgcagccgttttgatccgaccataggttctattcgttcctgggatttcgggaagtggaatttccctgtaatcattgataacatgatgaacctggacctgctgttttacgtaagccatcttaccaatgattccaagtataaggaaatcgcattgaaacatgccgagacaacattgaagaatcatttcagaacagatcattcatcctatcatgtagtcagttacaataatgatggcagcgtagaaatgaaatgtacccatcagggaaaaaatgacgattcgtcatgggcacgcggacaagcctggggagtatatggatatacctcttgctaccgtgaatccaaagatacagccttcttgcagcaagccaaagatattgcaacgttgattatgactcgcgtaaagactgaagatgcgatacccttgtgggattatgatgcaccggatagcccggaaacaccccgtgatgcatctgccgcctctgttacagcttctgctttgatagaactcagcacgttggtagaagacggacaagtatattttgattatgcagaaaagctactaaaatctctttcttccgatgcttatttggcaaaggttggtacgaatcagggatttatcctgatgcactctacaggttcgttgcccaatggctccgaaattgatactcctatcaattatgccgattattattacctggaagcattggcccggtatatgcaggtaaaaggactcgattataaatcgctttaaacgaaattaatataccatgaaaatagcaaagtattttttatgtctggctcttttgctggtcgccataagtgcggaagcgcaacaattgcggaaggaagcttttgatttactgaacctggattatccgggtttggagaaagtaaaggccgcatgcgcccaacaacaatgggataaagcggctcaggctttattggactattaccgccaacgcaccggcataggacatcctgatattaatctgaagaatatcaagatatcaaaggaagaacaaaaatgggcggatgatgccttggaacatacattttttgtgcacaaaggatatcagccttcctataattacggtaaagacatcaactggcaatattggccggtacaggacaatgagttgcgctggcagttgcatcgccataaatggttcaccccgatgggaaaagcatatagaatctcaggggatgagaaatatgccaaagaatgggcataccaatatatggactggattaagaagaatcctctgacaaccgtagagaaagaagaatacgaacttgtcagtgcaggtgaagtaaaaggaaatgctgagaatgtacgctttgcatggcgtccgctggaagtgagtaaccgtttgcaggatcagacactgcaatttctattgtttattccctcacaggcttttactccggagttcctgaccgagttcctcattaattaccatcggcatgccttacacattctgggcaattactccgatcaaggcaaccatctgttgttcgaagcacagcgtatggtctatgcaggtgcatttttccctgaatttaaagaggcaaccggatggagagagagtgggataagcattttgaaccgtgaaataaaaaaacaggtttacccggacggcggtcaatatgaactggacccgcactatcatttggcggcaatcaatatcttctgcaaggccctgcgtatggcagacgtcaatggtttccgtcaggaatttcctgtcgaatacgtgaatactgtgaaaaatatgattgagttctactctaatatctgtttcccggattacagtaatccttgtttcagtgatgcgaaactgggagaccgcccggcagaagtccgcaattatcaagactggctcaaactgtttccggattgcgactggattcgttattatgctactgaaggtcgtgaaggttcccccctacccaacctttctcacggagccctgacttccggtttctttactttcagaaatggctggaaacaagatgctactgtaatggtggtaaaggccggtcccaaaggtgagtggcactgtcaaccggataacggaacttttgagctttggttcaatggtcggaatctctttccggatagcggttcatacgtctatgccggtgatgatgaagtgatgaaacttcgcaactggttccgccggacaagttcacataataccctgacactggatgagaaaaacttgcagaccacacaatccgttactaaactttggcaacccgaaggtaatgaacaaatcctggtgacagagaatcctcattatgagggtttgaagcacagacgttctgtcttctttgtagaccaatcttattttgtcattgtcgatgaggctgtgggagatgcaaaaggaacagtgaatctgaactatcatttatgtgaaggtactgtaaatgtggatggaaagaaccatattctgaccaccgcttatgacgggccaagcaatatgaagctacaatgttttgccgaaaagaaagcttcgataagagaaaaagaaggatggcgttcaactgcttatcgcgtacgtgtaccccgtacttcggtttcttttgatgtggacaaaaaggattcggaagctgtacgctacataaccattatctatccttcgaaaaatgcagcttcttttcctgcattcaaggctaaattcctgaataagaagtttgatgagaatggagtgaagatagaaatatctgttgatggaaagaaacgtcaattggagtataaactataagaagacttttattatgaatcgcttatcatacttatttttgcctctcactgccatcggagtctccgcttgcagctccaataaggccaaagaggaggtgaaacgtccgaacattatctttatgatgacagacgaccatactacgcaggctatgtcatgctacggtggacgcctcttgcaaactcccaatatggatcggattgccaatgaaggtattcgtatggacaattgctatgcggtcaatgctttatccggtccgtcaagagcttgtatcttgacgggcaaattcagccacatcaatggattcactgataatgccagtactttcgacggcaaccaacagacctttcccaaattattacagtcggcaggctaccaaacttcgattatcggtaaatggcatctgattactgaacctcagggatttgattattggtgcatcttgaccggacaacatgaacaaggggattattataatcccgatttcaatgagaacggaaagcagattgtagaacagggctatgctaccgatattatcacggataaggccattgagtatctggaacacagagataaaagcaagcctttctgcatgatgtaccatcagaaagctccgcatcgtaactggatgcctgcccccgccacttgggtatgttcaataataccgtttttcctgaaccggccacactcttcgatacgtatgaaggaagaggttccgctgccagggaacaggatatgtctattgaacatacattgaccaatgattgggacctgaaactgctgactcgtgaagaaatgttgaaagatacgaccaatcgcctctatcaggtctacaaacgtatgccggctgatgtgcagaataaatgggattcagtatatgcccagcgcattgccgagtatcgcagtggtaaactggaaggtaaagagttgatcagctggaagtatcagcaatatatgcgggattacctggctacaattgttgctgtggatgaaaatatagggcggttactcagttatctggaaaaaatcggtgagttggacaatacaatcattatctacacttcggatcagggtttcttcctgggcgaacatggttggttcgataaacgcttcatgtatgaggaatgtcagcgtatgccactggtcatccgctacccgaaggctatcaagagcggaagtgtttcgaatgccattgccatgaatgtggattttgctcccactttgctggattttgccggagtagacatacccgccgatattcaaggccggtcgctcaaaccgattttggataatgagggaaaagtaccggcagactggagaaaagccgcctattaccactattatgagtatccggcggaacattcggttaaaagacattatggtattcgtacaactgattttaaactgattcacttctataatgatgtggacgaatgggaaatgtacgatttgaagaatgatccgaatgaattgaataatgtgtttgacaaaccagagtatgccgacaagcggacagaactgatgtcactgctgaaagaaacccaaaagcagtataaggatgatgatccggatgaaaaggtaaatgagctgttcaaaggtgacagacgattgatgaaaaatagataatctaaatgaataccatgaatagaagaagttttttaaaaaatacaagctggtccttcctcggattagcagtttccggtagcttattgtccgcatgccaacgcggaactgccgcaggaaagaaaattatgccctctgccagtaatctgaaatatttctggggagacttgcataaccactgtaacataacctacggtcatggcgacatgcgttctgcgttcgaagccgccaaggggcaattggattttgtatctgtcactccacatgccatgtggcctgacatacccggggcagatgatcctcgcctgaagtgggtgattgattatcataccggtgctttcaagcgtttgcgcgagggaggctatgagaaatacgtagccatgaccaatgaatacaataaggaaggagaatttcttgcctttgtaggttatgaggcacacagcatggaacatggagatcatgtggccctgaactatgacctggatgcgccgttggtggaatgtacctccattgaagactggaaacaaaaagcccgcggacataaagtatttataactccgcatcacatgggttaccagacgggctatcgcggatataactggaacttctttacggaaggagaccagactccgttcgtagagatgtattcccgccacggattggctgagagcgatcagggtgattataattatctgcacgatatgggacctcgccaatgggaaggtacaattcagtgtggattggagcaaggcaagaaattcggtattatgggctctacagatcagcacgccggatatccgggcagttatggcgatgggcgtataggtgtactggcagagtcattgacccgtgataagatctgggatgcaatgaagaaccgtcacgtttgttgcgctaccggtgataagatcaatatagattttcgtctgaacgacgcttttccgggcgatgtggtacggggtaacagtcgccgtatttatttgaatgtggaaggcggcagttgcatcgattacatagacattgtcaagaatcggaaatgcatagcccgtttaagtggtccgttgttgcccgaaatgccggaaggagacatggtacgttgtaaggtaaagattgattttggatggaaccgtgaagagcagtatgtacattggcaaggtaaactatctatcagcaaaggaactatcaatgctgtggaaccttgcttccgtggcgctgccttcacttctccgcaaccgggagaacccgagtttgagacaaaggtgaaccgtattgtgtctgttacggacaaagatacggagttggacatgtacagttccaagaatccgaataccaccactcccgccatgcaggccgtcattctggatgtcactatgcctaaagacggtatgattacggcagagttcaacggcaagaagtttgaacattcactgggcgaacttctggaaggttcccgctcccatttcatgatcggatggcttagtgaggctatcctattcaaccgtgcaatgccggaaagttgctttatggttgaacattatatggaagacactgaacccgaaagagatacggactattactatatcagagttcgccagcgtgaccagcaatgggcatggagctctcctatatgggtggaaagaacataatgtttccttatttgatgtaataaattatggaatacgcaattggcattgatttaggtggtacatctataaaatatgctttggtagataaagcgggtaattctttctttgagggaaaattaccctcttttgcttctgtctcggctgcaaaagtgatggaacagctgataaaggctgccaccttgctgaaagatgaagccgcaaaacagaactggaccgtactgggcatagggctcggtacaccgggaattgtagatgaaacaaatcgtatcgtactgggaggtgcggaaaatattgtcggctgggaaaacatagatgtagcctctcttatggagaaacagatgagtttaccggtagttgttggaaatgatgccaatctgatgggactgggagaaacgaaatatggtgcaggaagaggttgcactcatgtggtgtttctgactgtaggaaccggtatcggcggagctgtcatcattgatggtaaattgttcaatggatatgctaaccggggtacggagttggggcatgtaccgttgattgccaacggtgaacgttgtgcctgcggggcaatcggctgcctggaacattatgcttcgactgccgccttgacaagacgctttagtgcattggcgaaagagcagaatttaagttttgatacggagataaacggggaattgattgttcgcctgtatcatgaaaatttcccgctcgctgtcgagtgcatgaacgaacacttttactatttgggcagaggaattgccggctttgtcaatatcttcagtccccaacggattgtgataggaggaggtgttgcagaatccggcagtttctatttagagaaaataagggcggtagtcaaaaaacacgtaatagcagactgtgccctgaataccaagattgtagtagccgaattgggcaataaagccggtcttatcggtgcagcatcactaattctataaacaaacgaattattatgaaaaataacaagaaatggggtatgctggcattgatcatgatgttctggtttaccatttcattcattacaaacattctcggaccgttaattcctgacattatccataactttgagctgaaggatctggcaatggcgggatttatcccgacttccttcttcctggcttatgccatcatgtcgataccggcaggcatattgatagataaatatggagaaaagccggtgctgtttaccggtttccttatgccatttatcggaaccgtcttgtttgcatgtttcccattctatttgatattactggtatcttcctttattatcggcttgggaatggccatgttgcagaccgtaattaaccctttgcagcgtgttgtcggtggagaagagaactatgcattcatagccgaattggcacagtttgtgtttggagtagcatcgtttatcagtcctttggtttatacttggttaatacatgcgctggcaccgggagtctatcagccgggaaagaatttcctgcttgatattttggcggacatcactccggtcactcttccctgggtttccctttattgggtattcacagtgttattgctgattatgctgctcattgtgtcgttggtccacttcccgcgcattgaactgaaagatgatgaacgcagcggttcttcggcttcctacaagaaattgttccgtcaaagatacgtatggcttttcttcctgggaatcttttgttatgtcagtacggaacagggagtttctatttttatgagtacttttctggagcagtatcatggcattgatccgaagaccgtgggtgcgcaaagcatcagttatttctggggttcaatgactgtcggatgtttgtttggcatgttcctgctgaagttgatagacagtaagcgtttgctgcaaatatcgggcatactttccatgagtttgctgttaattgcattattcggctctgcggaaatagcggtgtgggcttttcctgcaataggcttttgtatctccatgatgtactccatagtattttcacttgccctgaatacagtaacccagaatcacggttcttttgcaggcatcctttgttccggaatagtgggaggtgcaggtggtccgctgctcgtcagcctggtatccgacgccacttcgttgcgaacgggaatgttgcttattctgattttcatgggatacattacgtttatcggcttctgggcacaccctttggttaataataagacagttagcttgaaagagctggttaccttcaaaaaacaaaaataagattctgagatgaaaaagatagtattgggcttatcggccctctgcctgttaatggcatgtggcagttccgagcaacctgccgtgataaaggtttccgaagaaacattgatgcatgaagtccgcgcaactccctctcctgccgatggcacatacgtcaaggtgaatccaccgcgtttcatgtggccggacaaattccctcatttaggtccggtgctggatggagttccgggacaagtagatgaaaagccaaaagtagtttaccggattcgtatctctcaagacaagaattttcggaaagatgtccttaccggtgaacgtgcctgggctttcttcaatcctttccagtgtctggcacaagggaaatggtattggcaacatgcttatgttacccccgaaggtaccgaagaatggtcgccggtttaccaattctatatagataaagatacaccggaattcaatccgccgactttggaaaaagtcctggcagaatatccttcccatcacccgcgtgtgttgctggatgcagctgactgggaaaagattatagcgaaaaataaaaataatccggaagcccgggcttatatggacaaggcttcccaatgcatttcccgtccgttgaagcatcttcaggaagagatagatacaacgaatgtagttacgttgaccaacattgtgcaacgtaaatcagccctcatccgcgagagccgtaagattgtagacagagaagaggccaacgtggaagcattggtccgtgcttatttgctgacaaaagacgagaagtattatcgggaaggcattaaccgcctgagtgaaattctttcctggcaaaaaagcaaatactttgcaggcgactttaacctgtccaccctattatcgatgagtacatccgcgtatgacggattttataatttactgtcaccggaagagaaacaactgctgttggataacatccgcagaattggagacaagttctataatgaatatgtgaaccatctggagaaccgtattgcagacaaccatgtgtggcagatgactttccgtatcctgacgatggcggcattcgctacggtcggtgaaataccggaagcgtccgtatggacagattactgttataatgaatggatttcacgccttccgggcctgcataaggatggtggctggcacaatggagatgcctatttccatgtaaatatacgtaccttgatagaagtgccggcctttttctcacgcatatccggcttcaacttctttgcagatccgtggtataacaacaatgccttatatgttatctatcagcaacctcccttctccaaatccggaggtcatggcaactcacatgaaggacaacgcagcccgaacggagggcgcgtaggatatgccgatgccctggcacgcgaatgtaacaatccgtgggcagctgcttatgtacacgaaattatgcaggaagaccctgacatcctgtcgaaggctttcgaagccaaaccggcagatttgacctggtatcgctgcacaaccccgaaggaaaggcctgcttatagcaaacatctgtcggaactaccggaagccaaagtcttcaaacaagcaggtactgccctgatgaataccgatatagggcatcatgccaacaatgccatgctttctttccgaagcagcccttatggttccacatcccatgccctggccaatcaaaatgctttcaacaccttctttgggggtaaggctatcttttatagcagcgggcatcgtaccggatttacagatgatcattgtatgtatgcctaccggaatacccgtgcccataactccatattagtaaacggtatgggtcagaagataggaacagaaggctatggttggattccccgctactatgaaggtgaagaaatctcttacgttgtaggcgatgcctccaacgcctatgggaaaatagtctctccgttgtggctggaacgcggacgtttatccggcactcaatttacaccggagaaaggttgggatgaaaataagctggaattcttccgaagacatatcgttcagctcggacgctcgggtttgtttgttgtttacgatgaactggccggtaaagaaccggtagaatggaactatctgctacatacggtggaactgcctatggaggtgggtaaggaagaaggaggattgcgcatcctgggtaagaataaagcggatggaatatcgatagctcatttatattcttcacaggagatgacttatgcacaaacggatacattctttgtagccgcccttgactggaaaaagcgtcttggcaaggctcttgctaatcattatcattttacggcaacgacaactccttgcaataaagtgttttttctcaatataatcgatgtacatggaaacaaccgcgccgatgccgtgataaatcatcagggaaatcgcattacagtagaaggatgggttattgaatgtaatctggatagtgaaggcaaagcgttcctgcacatagaaaatacgcagaacggtgcttcactggacttcaactataattcgaataagggtgctacgactatcgtcgatcaggtaggcggaaagagaatagagaaaagactggttgattccttaccgaaacctgaaatataaaaccgaatattaaatcatgaaagttactaatatggttaaacaaattccaatgaagcatctggcatttttttctttgctatgctcttctgcggcttctgcggccgaacgtcccaatatcatctatatattcacggatcaacagacagccagcgccatgagttgtgccggaaatccggacctgcacactcctaatctcgaccgattggcagccgccggtgtaatgttcaataatgcttattgcaccgctccgctcagtggtccttcacgtggagccatgtttacggggcattatccggatgcagtagggctgtcagtcaatggttcaccgatacccgactcgctcaggacacagacattaggcaccttaataaagaatgccggatatgattgtgcttatggcggtaaatggcatcttcctcttcttgatgtccccgacaaagaatacggcttcaacaacatttacaaacatagtgacgacggactggcggaagcttgcgccgaatacctctcacgcaaacataaaaagccttttttcctggtagcttcttatgacaatccacacaatatctgcgaatacgcacggagccaaaacttcccttatggaaatatcgatacgcctgatatacgggactgcccgggagtacctgccaatttcgccaagaatccttacgatgccgatgtcattgaaagcgaaagggcaaacaactataatgtatatccgactgtcggttttactcccgaagactggcgtatgtaccgttatacctattatcgtttggtagaaaaagtagataaggagatcggaaaaattattgatgccattgataagaacgatctttggaagaatacagtagtgatcttctccagtgaccacggagatggtataggggctcaccattggaaccagaaatctgctttatatgaagaagttatcaacattcctcttatcgtaaccctgcccggcaagaagaatgcaggcaaagtattgcctcaacttatcagcaacggtatagatttcttcgcttccgtatgcgactgggcaggtgccaagatgccggaaggggcagccggaaagtctttccggaaagttgtggaagaaggtaatccacaggccttacatcaggaatacatcatcaccgaaacacggtttgacggcagcaagacaagaggctgggtagtacgcactgagcgctacaaatatgtgctttatgataaaggaaaatatcgtgagcaactgtttgatatgcagaatgacagaggagaaatgagaaacctgatcatggaaaatgcctatagccaggaactgcaaaaacttcgtgatgtccttgaaaagtggatgaatacctataatatacgtccaacccgtccgaagctgcacgatgttcccggaaagaaactcaaaagcacaacccgatatcagacagcttataaatagattaagaaatgatagcccgccttattatctttaaagtgcgataggcggcaattagtttcccggcgtgaaactgacagtttcattacttgaaaccagtagtttcacaccgagaaactgacggtttcatcccttgaaactaatagttcctccgcaggaaactttttcttcctttatagtactaagtaacgttttaaaaataacttggtacataaatgataatttagcggcgagggaatgggtacgcggactacgcggataaggcggacgaacgcggactttaatcttttagacgcggatgacacggatgacgcggatttttaaagctgcgctatacataccggcatatcacaccgaaggaaaaaagaatccgcgtcatccgtgtcatccgtgtctgaaagattacttgcacgccgaaggagaaccttgctccagcgctacgctgctaaattatcatttataagccgactcgctgcacttgcttatgtaccaagttattttttaagcattactaaaagagtacggtgcaggatgatttcacaaaaaataaatattaaggctaaagctgaattcaacttttaagtgcgacacgtcttttagagtatttgcaaacctctttcctcttcaaactaaataccggcaggaagaagaaaatgccgataatagacatcaccaatccgccaatagtacccgcagccaacggaaaccagaaagcttccttatccgtccccaccataaacgggataaaacccagaatggtggaaactaccgtaagaaaaataggcagtatctttgcattccacgcctttgtatatgcccgaagcatagaaagccggggaaagcggctacggatgctgttatactcattcagaatatagatgctggcatttaccgtaataccacaaagcagcacaaacgaagcaaagcctccctggtcgaaattcaagcggaaccaatagaatgtaaggaacactcctatataagataccggaataacaaagataatagccaaaggctgtttcagagaattaaacagaatactcgttgtaaagaagataatggcaatcacaaccagcaacaacaggtattgcttgttatctttcttaccccatgaccacgattggctatccgattcagcagtataccccatcggaagcaatttattaaactcttccaaatcccgcttctgtattttattgccttgctcgtacgagccgatatactcatattgcagacaaagacgatattgctgattctctttggctatctgttgcggcatctgccccttctctaccgtagccaattcggaaagtttataatgctttccgccatccaccccgtaaggaaaaaactgcatagcccatacatcatagtcgtgagactgtcgggaagaaagtcgaatactttccgtaccgctttccgtcaccaccgaacccacctgcatattcttgccgaatatcggctggatagcggagaacaagtgctgggcattaatcccctcctgagccatacgctccttattcagattgaagtaaaactcttgataatcgtctttccaccaggaaaattccgacttgataaacacttccttgatgcgacggtgcgaaagcaatacctccttcagcttttcggcccatgcatagagctcgtcataattgtagccatacatcttgatgcgataagaacctgcgctctcacgaacatcattactgaaaccctgatcttgcaagccatatacatcccagctaccacctcctaactcagatactttaccaatcagattcgcctttaacgtataagggaaaccgctatgctgatactctttcttgaaataaatctgaagattggccctgcgtgcattatagacagaagcatgaaactgcttaatctccttgaagccgctaagataagtttccacacgtttcaccagcgtattcatctgttccagcgtacttccattcggtaagttcgcattcgcatagagcaccacttcttcattgcgactaaaataactgccttcgtacactttctgcacaaacaaacgaagactaccacctaaagccttatccaccacaggtttcactttctctttataagtagaggagcccaacgtcttgttataccgttctatccatttgccttcaccctccaacttctcaggaagaaggaaaacgggcaacccgaaaccaagcaggagcaaaatgcacaccgccaccctccagcgcagaagaaagcggatgagcaactgatagaaatgcgtgaagtaaacagtcagcctgcgaatacgtatatgactccgcacccagcgtttcacgctctgcctcttgacaagctttattctatcaatcatggccggaacaaaaaagagagccacgaaaagagataccgccagattaataatcaccacagctgcgaagtcttgcaggttcaggcggattttctcatccagaaagaagataataaccaaagcccccattgtggtcaaggtagccgccagtacggacataaaagctttcagattacgcctgtgcaaaatgtggtccgtcatcacaatggtactgtctatcacaagattcaaggacacagtaatccctgccaatgaatacagttgcatctccagcccgaaaagataatagaaaataaccgccacggaaatgttgatagccaggctggtaacgatcagcaacagatacttcagattcaacgtaataatccagacgaataccagcaggatcagtaccgtcagccccgtacggaaataaattttattcagttcctcgcgaatatactccgtggcatcatagctggtatgcacctcgtagccgggcggcaaagtcagacgtattgcttccatttcccgcatcacttcattgctcagttgcaattggttagcagtctctacggccgtgacagacatataaatggaattcagaccattgatacggtaatagctttggggcgcttcttccatacgcgctacagtcaccaactcgtccaagcggataatcttgccgtccgaagcagtcaccgtgatgtccgaaggaataaattgcccgctgactccatccggtatcaagaccagacgtatccactgcttaccaccggccgtatccatgttgtgcgttcccagaaactctttattataatgtaactggatggcccgttgaatatcagaaatgctgattcccagcgtccgcaattgttcactgtcgtattccaaccgccattccatcggggtagcaccacttaaatctatcttataaatgccttgcaacttagccagacgcggcttgatatgttcttctgcatactgctgtatcagtataggcgtggacggtgcattcagtgtgaatgataagaacggacgggctgtattcgcatcgggcaccttcatgtcaatatacggataactgactccggaaggcagttgcgaccatgtctgccggataatagtagaagcctcaaaacgtaccgcatccacatcagcgtgtttatccagatctaccgtaatggaaccgtagccattgcttgaagtagagtacattccctttacccctttgatgcgggccagcatggactccagtttgcttgtcgcctccatctctaccacccgcgacgaagtgcccggcatgctaaagcgcaccgtaaagcccggcaatgtgcgcgacggattcagcttgaccggaagcatcggaaccaaggccaaacccaccagtgccagacagacaaaggtgacgatgagggtaaaaggggaaaggcttttcattttagttgaaagttgagaattgagagttgagagttattagtgactataatcgaatttgtcagaaagagagaagccgctggcaaaatcgtgcagggtcagcttgcggattttataatagttcagccaatagtttttcagggctgagatatagttgcgctgggcttcttgctgacggttcaatgacaaggtaaggctactgatatccgccttaccgatgatgaagcgttggcgggtttcattgtatgccaggatggaaaggtcgagggcttcttcggcacttgtcaccaagtcttgctggacattgaaatcacttacggtcataatgacttcttcttcaatgctgatttcgttctgacgggaagaggtttttactacattcagattgttacgggccatattatattttcccttacgcactccccagtccactaaaggaatggagacgctgacagataccatttcctgctgcatagggcggttgtaggcttcgccaaatttctccgccacctggttgaaaccgacactggcgttgatactggcgttgaagcgggattctttcttggttttgtctacattccgttctgcttccaatatgtcctggcgtaatccaaggaagttcgggttgttggaacgggcggcatccaaggcagcatctacagggatgtttagttctccgggacggctggggagaagaagccgtatctctgtattcttttccagattgaggaaagaagccagcgagaacatggcacgtttcaatgaactttcagcattctgcaaagtgttacgggcattcaccacgtccagcttcagcgtcagaagatcggcacgactgatagaggctatcttcagacgttgcataccaatacgataaagcgtatcggaagaaacgacattctcctttgccaagtcatactcagcctgcgccatggcaagtgcaaagaaataggtagtggcctgctcggatacctgctcagcattgtagatatattctttctttactttctcgtatttcagcggttcaatctttcgttcccagcggaaaggattataacctaccagactttgcgaataacctaaacgaacgggaacactggtatactgcgtgtagggattggaaccgaaactacgcatatagcccaactcagtatccagataaaaagtaccacccgtcaggtcaaagttttgcctgactgccaggttgccataggcatagaaagactgttggctacggtaaatatccaaatcctgttcggagtcataacgcttcgtaatgtcacggttatactgtgcaggagtcatattcagcgtcaggctcggcaagcgatttgccttataggtacgatattcccaatagcctgaaagatacatatttttagtacggaaagcttccagcgaactatcgttcgccatcttaatcgtctgctgcaagtccagcgtaacctgctgttgctgcgcgacggacggaaacgcctgagaaagtcctacaagaataattaaaccaagtttcttcattatatcaagcttttttatcccggtaaataaaccaatatatcaacggaatgatgaacagactgaccaatgtgccgatgaacatcgccccaatcatggcaatggaaagcggcttctgcaattccgatcccatatcgaaagagaacaataacggtaccatggcaaaaatagtagtgagcgaagtcatgatgatgggacgcaacctgcgccgtcccgcctcatggatagcttccagaagcggcatccccgtcttacgtaattcattaatcgcatccagtttcaggatggagtcattgatgataataccacacgtaacgatcagaccgatggcagacatcagattcagcgtatgtccgcatatccacaacagtaccagggcaaatgctacgtctatcggtatctccaacaatactacaagcggttgcacaaaactctcgaactgtgccgccagaatgaagtacatcaacagaatggaaataaacagaataaccaccagttcatccagcatcttccggttagagaagaaacttcctgaaaaagcggtatcccaatcaccggtagcatccaccacttccttcacttgctccataagcggttccgcctcttttacttcataaaaacggaacggaacatattctccgttacgtcctgcggtaatcgctttcagatcttccgccggcgccactgataccagctcacgcaaaggcagatattcaacaccatattgatccgcccgtgtcggaacgagtgtttcctgtaagatgctgttgaccgtttgttcctctcccacaatgctgataggcagatattgctggtaagaatgaagagtagctatgctgttttctttgaaagctgttttcagtatgcgatacaactcgtcatacgaaacattataaagtagcaatttttctttattgatacgaatattcagttgattttcaaaggcaatacccgtgggagcatatcctgtacgggtagcaaactcagcttccagattacgtaattcatccgctgtcggcactttttccttgttgcgggaataaagttcagccacaacatcggcttctcccgtcacaaacagtttctcaaataccgtctcgggtggcgaaaaagaaatcacggccaacggatattccgctttgagggtacggtaaaccttttcctgcaaagggactatctcagagggattctttgtcttgaaataaagttctgcttccgaagaagaaagagcctgctcccggttcaggagatagtcttgttgtccgacggcggcagtctgttcgatagtctctgtcttaaacaactcaaataaattgtctaccctgcgacgattctcgtccacatggatattctcattccattccacacgggctatcagctcattctgatctatttccggcatacgctcttttcctatgaaatagaacatgaatacacacaatggcacggaaactatgcagaaaaatacgcttgccgttttatgagcaaatataaaatcaatcccggcatcatagaaacgatcaagtgtatgatcctttataggattattgattcgaatacgcgagaaccatgatttgcgcagtcctgtccggtaaaccagcatatagagcaccggcagcaacatgatgcccgtgaagtaagaaaccatcaatccaacggttaccgagaaagcctgatcgtagaaaatggctccggcaataccactcataaagatcagtggtacaaacaccgcaatggtagtcaacgaggaactgagcatcggagtaaccacctcactggtacccgtaatacaggcacgtttcagcgagtatcctctttcccgatattgagaaatattttcagttacgatgatggaactgtcaatcatcatacccaatgcaagaatcaatccggacagggatatgatgttcagtgacatcttgaacaaatagaaaaaaagaaaacagatcacaatggaaactaccatactcagtccgatgatgaaaggagatttgacatcccccagaaagagtacggctacgatacagataaatagaaagcccaacgaaaggttttgttgcaagttggagatagtataatccaaaagctctgtctggtttcggctaacgctgaattcaatgtcaggatatacactctgaaaataattcatggtgccgccaatggcctgcttcatgtcatccatattctcgtccgcctgcttgataatggccaatgtcactgcccgtttaccattgctcatggatacgcctttttccctgacgggaacaatacctatccggcagaactcttccagacggatgatgcgtccgtttttgttaataagaatattcttcacatcctcttccgtacgcaacagagtggaaaacttgatattgtattcataatatccatcacgtacggtcatacttcccggttccacattattttgggcaagagcagattctacatcctgtatggaaagtcccagtacggcaagcttattttcatcgggaacaatctgcaactggcgctccaccaatcctgtgatatccaccatggctacctctgtcagctgctcgatacgccgtttgataacgctttcggcaaattcacacagatcgaggaaagcacgttcgtccgtttgtccgtaagtgctgtcattcttcagggtgaggctgagatagaataccggaatatcggtagcacttgcttttactactttaggacggtctgtatccttaggcaggtagttcatggcggcgtcaatcttctcattcacttcgataaaagcaagatccgtattggtgccgaagtcgaaattcagccggataagacctgccccatcatgcgcctcgctatccatatctttcagacgagccacctggataagttgttggcgcaatggtttcaccaccgtattctccaactcacgcgcagaagtattctgtgctgagatttgtactgtaatctccgggatggcaatatccggcagcagagataccggcaacgtgaaatacgttaccataccgacaataaaacatgcggtaaacgccatcaatacggcaatgggccgctgtaccagaaacttaaccatcccctcctttaatttttaattattaattcttaattatcaccggtgcctcatgagccaggttcacattgcctgtcacaatcaccacatctccttcttgcacttcatcttccacaatcgtgtattcatcggaattttccagtacggtctgcacatagttccatttcgctttattatctttcagtgtaaaaatcacctgcttaccggaacgcaacaccactgaactcttcggaacaaccaactgttcacctagcgaacgatgtacattaacccgtatgttcatgccattaaagagcttgccctgtccgttgacaacggccttcactttcaccatgcctttatcgtccaccagcggattgatttcggagatacgtccttcgtatttggcagaaggatctgcataaggggtaacaaccactttatcgccacctttaataagggggagttcactctccaatacagtaaagtcagcttccatgccctgtgaaccgataattgtacagaaagcatctgaactgctgggagcattatagggtttggaaaagagattagccaccaccccgtcaaaaggagcaatcagagtggcatgttcttcttcatatttagccagttcatattgagaaagggtctgatcatagccgcttttcacccgtgccagttgcatgatatcatcgggtacattggcagtatcatccgctgcatacccctgccctatcaatacatcctgcaattccaacttagctttctccaaagcatctttggactgtgcggtcttattttttaaacgaaatttatccagctctgccagtttttgtcctttgtgtacccggtcaccgttcttcacataaatctgcgccacgatacccgaactttcaaaacgcaaatctgccattcctccggccactatcttgccattacttaccaactcgtgattgaatatctgccgcttcaaaggcaacacggtcacttcattcttctcatccggcaatacggtagctactccttcatcggcggcttcttcttttttcgcaccggaacatgctgccaacgcaaatagtgccagacagatcaaaaaccggtagttctgtgtctttatcattctatattagtttttccgtttacacttagtgtatgcaaaaatagtcgttttccctttacgagccgccatatatatatggacaaaacgagactggatacaaactgttatttttctaattatcaaacaagtatattcttgtccattcccaaacaggtggacaagaacatacctccttccttatttagggactgtaataatcactaccggattagaatcatccgtcaattctttcagtgccgaaagtttttcattttctgccgcttcaggattttcttccaaccaggtcatcacttctccggcatcaataatcattccatattctccctgtgcactgcatgccttgggatggaaagccataaagccggtcaggtcatcttttataccttccttttcggcatacatccgggtagtatttgccttccggtcgtagattccgttaaacgtttccggttcatctgtataaagtccccggatacactgaaagaaaacagtatgatccgtctcaaaaatacatcccaccaacaagcgtttttcgttatctttggattcagtacgtgcctcggcgccccaatgccatttacctgtggagaacgcaatataaggtgtcagctcattcccttccactgtataaatggtatcattgaaattctctttataacgtatcttattatcactcttccacaggaaaggaatacccgctacacttgccgaggcatctccacttttaaatgtagtcagaataatacctgcatttccctgctttttgacgctgatactgtttatgtcatctactcctctattaggcaaaaccggaagtagactgggcaccgtatctagctgttctcccgcttcattaaataacagcaaagcgcgcccgttatcacctacaatattaccgtaacgacctattatcacggaatctgtaaagctgaaatcactcggtgaatccggaggggtaggtatcgttacaccaccacggtaattaccttgcaaatcatatttctgtaacttaccgggtctgcgcataaaataaagcagaccgtttacatcattataagtaggcgccgcagttgaataagcttccggatcatcgcccaaatgtcccactttgcttaaaaacttaccgctctctttatcaaagataaaacaagtttgacgtgaaaagacaacaatctctttatccagtaacagaatattcgggcttccacctaccagacacgaatcggttgtttctaatggaacatagcatacatcgcttcctaattccgaaagtttcaattcggcaggcttttccatagctcccgccacatcaatactagaacataatccatctgcagaggattgcggagtaccggtacaagccgccatcagacaagataagcctgtggcatacaaccatccttttctcataattctttgtgtgttttcagattcaacatttataacatctccgcaaataaactaatatttttagttttaaaactaaagtttatcgttaaagaagtaaaaaggcttatttaaaacgcgacttttcatacaattccttcttattgattatgaacagtgattgattattctctatattttcacaatcttccaacgccattataactttatccttatctactttgagaaaagaagctaaacgatattttcctccattcacttctgccggtagaatataagtagttgtattatgagtttccttattatacagagccaaccttaccgagtcctcacaagagaaaacaaaataaagatagttctcttcttcataaacatacctgataagcgttgccaactttttgttttcaggcttatttacataatcaattaagtcataaacatctttattgaggcgctccactgccggaatagcatattccccgaagtttacgaaatatttaggctgaaccatacaatcatttactaccgtatagattgtatcactcaaagcttcccaataagtgatgaaaccaccattatcatcacaattcataaaatcaaatagtagaaatccggtgtgaagcgaatggccctccagtgtctgagttatcgtatatttttcatccaacaatgaaagggccggcgtcacataccctggagttccattaaagctattctttgctatatatttatttttcccataaggacggataagctgaggagcacattctacatccgatttttttacagccttttccgtacgcaaataacgaccggaaggagcaaaaaacaatactcgaccctgattaaaatcataaatacataattcttcattcttaataaagaaagaagataaattcacatactccttattaccttgtcctattccggatatgttatataagtaattaccctccgtatcaaacgtcaatattttatttctggaccgtataaagtatttgtccttaacctgatctatcgacacgatgtcatacaacaaagaagagtccgatgtctcaagcgggattattctgcctcgctgtaaaggcagttctacactctgctctacatcaacaaatatttcgttactaaaatcagaagatgatttagtagcggtacaactatatagcaatactgttatgcataaagtcaacataatatttttactcatatcaaaacattttcatgaaataaaatcatatatcgaaacttcagaattcaaaattctggcgtaaaatacctttctttgatttgtttcaaataggtatctgtatatttcccataattcctatcgggtatgaacaaatgttctattttattgtcaacaattacaaaaaagcaaacaaggctggtattatctaaagatataccaagcttcttcctacctatatttatagtattcccttctttaaatttttcatttatcgaataatcagatgccagatatagaatcgcagaagcctcctcagacttggagaaattctcttttatacacttctttgcataattaagacatgcatcacatgattgagaagagtaatagcagataagccgtggttcacttaatttaagttccttcacaccaatagaattatcactacaaataatcgaagctgttatattatcctgtatatacatttcttcaataaaatgttcattttcccagtctgagatcgacttttctaatgacattttgtagagtataacagatgaaacaattaaaatactaagaagcaaaacaaactgtaaggaaataatcacctttttcatgatttctaatttatttaaaaacatattttataacaacaggattatcgtcatcttttatactatcaaacactttacgagtatcagcatccaaatcttccgcatttagtatattaagaccataattgggatctgctcctatcaaataaactccactttcatcaacaaatgaagggatgcattcatgaccttctttaaaggcattaaatactacaggctccttactttgtttatcataaataagagtccaatatttattatcataagcaaaatcggtaatataatatcgtgaattctcaccatatgaaacaaaaatattcgcatatttagctccaactgtacgagcatatttaaagtaatattccataggttcatccttcaagtctgaaatttcaaaattctgttccccaaaatcccaatgatatttgggaatcaacgaattattttcgaaggtgaaaacatctccattataggattgtacaaaatgtactttaccttcacaaatataaaatggcgaatacgtatgatgataaaaagtattaaagagaagaaattttggtaaatcatacaactctgagataatcttgcgttgaacaatattatataccaccattttattcccttcacgagaatcgctaaaaagtaaatatgtatccttgtctagtgcaataaattgatgtacagcaggtacagtcaatggaagagggatcttctctttaaaattttgcccaagactatcatatcgaagaatacctcccataggagacaaaaggtctaaatcacccgtaaaaggattaaaataaaagctatataattctgtatattctcccggaccattaccatgtttatttatatcatataaaaaattaccattttcatcaaatactaatttttttttttgaggcgtatcaagtatataatatttactatcatgataaatgcgttcacctacatattttatcaatgagttctcagatgtttccaaaggaattatttcaactcttgagaaataatcgtaaaaagaaggtgaaattgttttttttaagtcaatcttacatactgtactatctctattaataatttgttgattgcatgatgtcattaacaacataccccaaataataacaataataattctcatattacatatacttttttattatttataataggatggccaacatatcaatacattagccaccccatagcattcgtacaattatctgtgatttatacaataatcaataacacccatccagaatgagctacagtagtctttaggaacacctgttgcttcacaataaactcggcagcgatggagatctattgtttctgtacgcttttgatagcaatctccacttcctcctgtactacatttaatctcaacccctccgatttctccaccatcaataggatcatcttccccactgatagcctcaatcgtcgatgtattcatatcgtaagagcgatcagaactcaatacagttctcacattcaatgcagtaatagcaataaccacaactgcaaacattacaatcttaatctttttcatttttgattttttaattgttaattgttaattcaaatttatagaaagctttctaatttcatttctcatttcattgattgcacttgaaaagactttaggctcttttgttagaacaataatgctcatcttctcaaacttttctttattaaagtaagcagaatctgtataaagtttagccaacatataataaggataaatacgaataggtagtctatgagtagaagcaataaaacacgattcagccttctcatacaaacctaattgtaaataacattttccttctgcattgagtacagctacatcactggaaactttctctgtacgctccaacacctcaatagcctgactatactgcttctgttccatcagcacatgtgcatatcgaaaaagaagtttcggactgtgcataatcttctcataaactgattcgtatgcagacgcagcttcctgatatgcattttccgagtaaagcatgtgagcaaataacaccctctctttatagtgcttaatatccttcaactgataaatacaagatacagaaacaacaagtaagagaatggatacaatatacgcaacaatacttccggaaaaacaacgacgttcttcttccttgccgttagaaacacataaggaggcaagtaatataccaactaccccaaatggaaacacctggagcggataagccgaaaatgcaaaaacacataaagataacagcccgccacatataccatattgcctcgttcgatagcctttccgaaaagtatagtagatgaaagcacaagctaaaaggagcaagacgactcctccttcaaccgtcaattgcagatactcattaaaagcatatacaggagaaccggccactctctcttcccattccgagtaatcgccttgagaaaaataagcggattgttcctgaccgtaaactttcggaaaactcccaggcccatatcccgaaataggactttgggcaataacagcaagtgtctgtttccagataaataagcgtccgcaaacagaatcggacctcatcgaaatcaataagcctgcaatagttccacctaatatcaggaacaaaaccatacaaagcaccgtcgccttaaagtgcgatacaaaatattttcttaactcccccacccattgaaaatggagagacaatacaaaaagactactaacaatcaatgctccccaagccgaacgactcatccctgccggaatcatagaaaataacaacacggctaaaatcgcccagacatatttatcccgcttctgagcattaagcatctgtcctaaacaaatggggaaaattaccgccaaataacctgtatatggtccgggattataaaacgatcccgtcacagcaaacatcttatgataagagcctgtaaaaccgtatatttgcaatatgccccatatggtttgtatgcatcccagcaaggccaaagcataaaatactgtcttcttacatacgggacaacaggataaaataaagcgcaatgcaaaccagaatacacacagcaaaacagcgtaaattattttccagttagctaattgttcttgataatcgtatcttattaaataccatccaatcaaaacaataaacagcatatcggagattgcaaaataaaatcttactttacttacaaacagcacaatgcacgacacgaaagccactactcctacagcgcaggcaatagggaaaagctggaaatagttatccactatttcataaggaacaaaggtactgaccggcacaagacagagtactattgtaaaaaacagagatatgataatattatttttcatttcaatatcgatataagtatacctcttcaatcacaaagaaaatctcacaactttttaaatattctattccatcgaatctgtccggtttccaaaacttttgaaaaccagatgaattgccctactcccaagatgaagtcatccggcagtaatccccaattacgagaatcgtacgaatagttcacattatcccctagcatgaaataataatcatgcttgaagtgatattcagtcaataaagtatccgctaaataaaccaatcccatctctaatttcagcgattgtccggtttcatattctatacagtgtcggtagtggttgtagttacaggaatcaattggcaatatatctccaactttaggaagatacactttttccagactctcgcgagcaaaccactgatacgtatcaccaggtagtgccacacaacgtttacaaaaaaacaattttgcactcagtatcatcttttctttatcttcagaatatggataattaaacaccactacatcattctttcgcacctgtctgataccttccagcctatgcaccaacttacgttcgtcccgtgactcatcttcttctataattctacgccccggaatttgcaaagatgccaaaatataatctccacccaacagagtaggagacatggaataagtaggtataacgcaaaatgtgaaccaatatatcctgacagatagatatatctgatataaggagaacaatacaaaagatgtatatcctacccttttccatactcgttttatttttcctttcatatctcaaaatactatatcaactcctaaattcttatcggttcaatcatacaattatcacctattcataccctacaaacttctgctccccattttccacatagaatacctgctcttccttcccgcgcgtcaaattacgcagccacaataaggcgccttcaggaatattccgatagactaattcattagtagtagcagtctgtactcccaaagaaatccatcctttcacaccagactgatagaacaactcatacacattgcccggagtgataaaattatcatcattgcgaggaacaaacagtaccttctttatagtactagcacgttgcaggtccaatacgatggaatcccgcggccctgatgagtaatagaatgtcagccaatcatcatcacacgccttgtctatgtcgtgcgcgggattctcatccaccggaccaccaccgtatatggctttcgaaggaagatgttcttcactgtccacactatcaaagaatgccagttctgcaatttccgccctacaatctgctgtgggataggcaggaggcggtggagtgaaacgcacataacgataagggcgtgaaatcttcggataataataattgaggttggtacggggagtatcggtcaagcaacaaagcagctcactcgtacggaaataccggtcattactcacttcaatctcagcacctgtcatggtcgccatataaccataaaggtattgtcttaacgggtattttctccttatatgggcagtgaccgccttcgacatatccggttcaaaatagcgtacatttccgtctactaccataaaaggatatccggcaggagaacgcgttccgttctcagaggtcaaaggttggaaaataacgcccggttctatattgttcacccgtgctttgccgcgtcgtaatggaactgcatccactgtgacatatccggaaggactgaacattcccagcagaatactatttccttctatattgtcatcaacctttaccttgaactcattctcaccaaagtattctgccgtcacatcctgataaaaaggtccaaacaatgaaactgtcttactatcgtgcgcttcaaaagtattcctgtagactttacctttctttctgccgtccgtagacccacgtttcaccacaaagtcagacgaatccatataccagaacggaataaatcctccatccgaatccttcagtacgttccacatatgatcgtgttgattagaaggagaataccaatatttatctatatttaccggaaagcccaatgcccggaaaacgtatacagcatgatcagttatttcgcgacatgtacctaccagatattccgacaagaaacgggcacccaaatgcggcatacggtattctgtggtgagaacaaataagttagttcgcttgaagtggcgtgccagtacattcacagcttccaccatatcattaccggtatacagcgaatcaagaagaggtttataacggtcataatacattttccgccaattgtccaatggctcatctcctatacgatagggcaatacccattcacaaaagtcgtcaaatgaataattctttgcccacggacattcttcccagaccttaaaggattgttcgatattttctatcagataatcggcagacatgtattcaatatccggacgtttcggcaatgttctgtagttaaagccaatccacttgcgcttccattcgctatcaggcagataacctcctatattcagttccaccgcggccttcatcaccgctttcacactatccagacggtcatcttcataaccgccatgcccaggcatatttcttataagaaagcgggcggcttctaacttcaaactatcattttggtagtagttcagcactttttccagttctatcctgttttttccggcctgttcgagtgcaaaatccaaacgtttatctcccgcactttcgcatgatacaaaaaatacaattgacagagaccatattattgtcatctgtactctattcatagtattataattaaattattatagtagttcttctcttaataatctttttacttggagacctaatgctaccattagacagatgcaaatgtagagagctgaggttaattaatagcggcatacagacttaattgagaattaataaacggttaatcccatgtaaatacagaattcaaactaatttaactgaagttttacatgcaaagtgataaagaatcctccttctttcttcatcctccgtgtcttcgtattcaatcctgtcatttaaaaaaagactcttactctttcttttcaaaagcattgccctttctttacttttacatagcactttggttatatacatattctttattttactataaccacaaatgtgaagcacgtacttcacaaccgtgaagcagtagtaccacgattgtggagcacgtgatcaacaattatagaaagtgctataacattggttatcaacagaataaacataggcaattaatataagcaaaccatactctgagcatcatcgcaaagcgggaattctcccatcgaaatggcacgaacgattgttatcctccatattcgacgtatttatgatgaaaaaaagtcgaaaagcggggggtactgaaaccgtttattcatgtacaaaaaacatgtaataaacagatttacaacagcataccccattttgtgttagtgtaggcaactctacctacacgctaattctacttgcttccaccactgcttattgccgatgaatagggcgatacagagcataagtgcaagcgtgtaggtaaaagcgatcataaactttcagtaaaacctgagcttgagcaggaagtttataggtacatttccctaatttctttctccaaagaagtaaaaacataaattattttccgtttaccgtctgataaaaagcaaaggcagacacccaacagcatagcaaacaatatcccaccatgaaaatgacgtacccaatactacccttgccagcgtacaattttgcaatcccaataaagtaaccaattgcagatactgtaacgtttcaatacaacaagcaaacaggaatatccatagtggcagccatcgcaatgggcgggtaataaacatacgcacaaagcaatatatgagtattaccaccaatacatctcccatatagggacgtatgaatgcgtcacgcacaaaaagggctattaatgtttcgaccacaaacaaccctgcaaaacaaattgcataaaaccaacggctaccaataaatgtatcatttctattatccataaatcgcctttattacatatttgaaaaattaaaatctattataaatgggaaacttcaaaatctcagcaacaacaatatcggattatcatcttctgataaattacttaatgcctcacaagtttcatttcttaaactcataatatataataatcggatttgaatcttccgtcaaggtctgcaatttatcggccccttctatacgaggatttattccgcctttcttcatattttcaaaaaagatatccttggtgaaaccgtcattcatgccgatgcaatatacccggttctcatcaaatgaatacagtttggaaactaacaatgtacctgctttatccgtataaagcaaatcgtcagttatacctgacataacataagctttattctcttctttcttataaagtatggaataaccatagtgacctacataatagccgaaatgaatatatttagcggtttcccaataatcaaatacattatatatcttatcgcttttcattaatctatcgcatatttttgacactcttgcagatttcgacatatcattctctgctatcaaagtttccaaatattcctttgtcacaagctttttactttgcaaagtaatatacggttttattcctttgggagttatttcaaatattgtatccatgaagatctgcataaatttgggatttccggtaggaccggagataaaggtatgttgatcagtactgaatagttcattccagcctttattatactgagaagcctcaaattgaaaagaaattcttttcccattagtaacgtccactttactcaagagaaatcgtttcccggatttatcaaatgtatacagattcgtatacaacgcattcttaaaaggttgaataaaagtagatcttgttcctttattttccaatttaaacgaactttcaaaagttccattaccactatacttcaatacattctgagtttgggagtccagtacatatattttcttattttccctgtcgatacttatatcatccggatcaatgtattcaccgggtcctttcccctgacgccctatcatctttataaatttgccttgcttattaaacagaaaaagacctctgcctttttccaatacatacaaattattatcacagacttctaacttatcaacttttcctaataatgattcatccgtatcttccaatacaatgattcccgccttgctgaataaagaagaataagtcatcttctccaacttctcagcacgatctaaattaatcacatagccattttcctttgctaagctgctattctttccaccaggaacagtcaataatcccagcattaatgccattaacattgtaagtgttctcatagtatattacattttctttctcttacataaccaattgcaaaagtaatcatcaaaacaagattatgaaaggaatagtcactatacttagtaaacttcaataatatattttctacagatggatacaaaacgctcctctctccttcaaagctatacaaggaatagctaaacggtaacaatcatttttaaggatatcgctacgatagtctgagagagaaacatccaaaacaacggttcggatgcggaacaaagaagtcaattcttcaatacgaccattgtagcctttggaaatgtataaataatcgatctgtaaagggtgctttgaaatcttatttttccagcgggcatcatggagcaggcaaacccgcctgcccgcataggaaacaatgtgattatgaaaagccagaccggaagtagaataatcagcaggcaaagcattgggaatagagagatgatgacgattccaataaggtacgagtgcacggtgcaaacggaaagtatccggcacactatcagcataagccaaccaggattctccactattagcaacgcaatggacggcaggacagccacggacattataaaaagcaatgccgcgctgaggagaagacaggctgacggaaatcgtatgataagtgatcagcaacaacaggcagcaaagcggaaaggatatgctgcgagcagttcggatagccaaactccgaaacaaaaacaatagaaaaagataaaacagcataatctcccaatgatctatccaaagccgatctatagaggacattggcagttcttctatccagcagagaactttgttctgagcacttagcagagcatcgacccctaaagcacagccagattgaaggaaagaaaaaggagtcaggacaagcataagaaccgcagaatacaaaatcaacgtcaccataggaatcacccataaatttgtcagcagaaaatgagtagagaaacgggagaaatagaatataactaaaggagccgtaccaatttgcgcagcaacggaaaccgtcagcaatccccaaacataacgaggaatgcaacgcctgacagagagcaggctgtaaagtttgggctgtatcaacaaaatagaaactaccgctacaaaagacaattgaaaccccacatcaaaaagccaaagtggattataaagtaacataaaaaaggcagtagccgccagtgtattcaacgataacaatttctcagattgtaaacgggatacaaccagcagagagaacatgattacggatcgtaccacagaagaagataatcccgtaagaaaagcgaatgcccacaaaaagagaataaccagaaaaaatcccaagggtttaaaagccgcccaccgcttccacaaaaaggagaagaaaaacaaaaataaagtagaaagcaagcctatatgaagtcctgaaagtgccagtacatgactggcgccggcaattgaataagtttcccgcatatcctcgctcaaattctccttatctcccaccgtaagagccgaaagtactgcaagattatctccctgaaaacctaaacgatgatatagttccaccactttttcccgatagtccaaagctatttgccgaagagaacgagaagtatcatgacctattatccgccaatgtccggcagagatatacgctgtgccggtaccaactttacgagtaagataacgtacataatcaaattcgtcaggattcccattattgacaggaggggtaatacgggtatgtacccataatctatctcccctctttaatgcaacagtagcggaatttctcggaaaatagaataaaaatgtacgtccatattcacttttctgcaaatcctcatcattcacttttccctctaattgagcatgacataacacgcttcgttctttcatttccggtttttccagaagaatcacctgatagactgccgcctcatcggaaaaaggaaaatccgtacgatgcaaatattcttccgtcataccggcgcctaatccgaaacaacagagaaagacggaaactccatacagccaatgaatacgatatttatcagaaaggaaataagtcagaaacagtaacatgaaacctgccagacaaatccaaacaggaaaaagattggaaaccggacaagatgtctctgccggaatatttaaggaaagttccgcccgctgccggaagaaatgcgcatctccacatacaataccgcctgcaaacggcatcagaagtcgtagaaacggatgtcgttgcaggctgttaattatcaatggaggaagaattagagatccttcagcgaatgtatcataccttcaggatcaggagctgcaaacacagcactacctgcaaccaatgcatctgcaccggcagctatcaggcgggcacctgtctccaaattcacaccaccatccacttctatcaatgctttcgaaccggtactgtctatcaaagcacgcaattcccgtactttttcaactgtatgttcgataaatttttgtccgccaaaaccaggattcacactcatcagcaacaccatatatacatcctgaataatatctttcaacattgccacaggggtagccggattcagtgtaacggcgggctgcatacccgcttcacgtatttgttgaaccacccgatgcaaatgcgggcaagcttcgaaatgcacattcatggtgtgcgcacccaatgctttcacctcattaatgaatttctcgggttgcacaatcatcagatgtacatccaaaggcttctttgacagttttgccacatacttcaataccgggaaaccgaaagatatattaggaacgaacacaccgtccataacgtcaatgtggacccagtcggcttcactgcggttcaccatttccaagtcctttgccagataagcgaaatctgcggacaggatagagggagctatgattggtttcataatacactacattttacagattatatacagatataacgtacaaatgtagacaaaagatttcattcatcctaatattataccctgcaagccttgcggaagctgaggcactgtacgataattacgggcaaggttacgaagaaaatccaaagttttcccggaaggctgcggatgtccatccggcaatgcattatcagcacttcccggtttcacggatgaagaagaaaaagaaggagtagtttttttatccataggcttattgaactgagaattaataattaattagttaaagctacgggctgcaaaaaagaagcaggaggtactttatatactaagaacggaagaagaagagatatagtatacaagaagttataaaaaaacatgagagatgtaaataaatcagcccaggttagtgccaacacaccatacctgggccaatatctggttgagatgaaaatatttatttcgctttggctaagtcaaatgagaaagtagtcacgggaagttcgaaaggttcattattcactttcacaccagttacctgaagcttgaaagctaatttatcaccagcataggcaaaactacctgcttcaggtgctgcaattgtcacctccactttcaagtccggggtttcaccttctccttcaccctcaccttcagtaggttctgtcgggaaattgatttcaagaattagtggttcaggagtgaacgccatgctaataactgtcttatcgtcattgaaagtaggtgtatacttcactttgtaacttacatcacctacggcttcaataattccgggagctgcctcccccataatggctgtaatcaaatccgctaccgggaacttttcaaaagacacattttcattggttacttctgcgctcacatccgtaccttgaggttcttcaccctcttctgcaagaggagacacagatgtagtttgcatttttccggcataattacctaccacgtcagtcaatgcgggaacattaggtttaggttcatcgtcatcatcacaagatgtgaaagtagttaccaggcccaaggccattacaagaaacacgaaacgctttaaacaatgtactttttccattactttaataagtttagtctagtaaataataaaattaataaaatcacataattaaggttgtacgtacattaggttaaatggccttatttgtgaaatactgcatttggaaaaagaaaaaatttattaaaggatgtatcatttagtccatcgtcagcacgattccatgcttctccgccatccggcgcaggttcaaaatagcataacgcatccgtcctaaagaggtattgatgctgactcctgtcatttctgctatctccttgaaactgaggtcttgataaaagcgcatatgtactacttcccgttgttcgtccggcagatgtttcatcaggcgacgtacatccgaaagaatctggtggttcactatttcagcttcaaccgttccttcagacagacggatattattcagtaaattccgttcttcttcatcacaagacaccaggttttcctgcttttcctgacggaaacagtcgattataagattatgtgcgatacgagtcaaccaagccgggaacttaccgttttcattgtagcgtccctgctgaatggtgacaatggcttttgtgaaagtctcctgaaagatgtcttccgccagttcttcattgcgcaccgtataatagatgtacgcataaagacgatctttataacggttcaacagaatatcgaatgcctcgttattgccttgtgcataaagggccaccaacgtttcgtcagcagcatttgtttgtactttcattacgtgtgtttttagatttcagcgtaatgtattccgataggcattctatatttggtagttaataatatgcaaagaaaagaaattttcaggaaagaaacaatattagaagcaattattaagttacaagctacaagttgctacgctatcactctgcatagtacttgtagcttgtagctcgtaactatttcactctgaattcttccgtcaaccggaatccacgcaaaagttcatctgtcttcaagcgtttcttaccgggaagttgcaaagcacgtatgccgataaatccatcagcagcggctacatggatataagtcttaccatccgtcagcaaagttccgggagtcaactggtgagattggattattttttctgtctcaaatatcttcataactaccgtctctccatcaggttgaactaattccgaccaggcagcaggataaggagacagaccgcgaataaaatcataaatacgtttcactggctgattccaatcgatacgacaggtatctttaaaaatcttcggtgcagggcgcaattcgcctacaactgccatttcttcctgtggaataggtttcactgcatcattcaggatcgcatctaccgtttcagtcaccagttttccaccaagcatcatcagcttatcatgcacaatacccacatcatccgtatctgcgataggaatacgaacttgctgaatcacttcccccgtatcgatttcatgacgcaggaagaaagttgtgatacctgtttccgtatcaccattaattaccgcccagttaataggagcggctccccggtattgaggcaaaagagaagcatgaagattgaaggttcccaaacgtggcatattccataccacttcgggcagcatacgaaaagcaactactatctgcaaatcggccttccactcacgcagagcctcaacaaaagcctcatctttcaacttttccggttgcaacaaaggaagactatgttccagcgcatactgtttcactggagaaaactgaagtttatgtccccgccctgccggtttatcaggcatggtgataacacctactacattatatccaccttctactaaacaccgcaaagactccacagcaaaatccggagtccccatataaactattcgcaaatcttctttcttcatcatataacaactttattaatcttcagagaaatgcaccagtacctgacggtatgaattgaatatcttcgacttggaaacaaatcccagatagtgcccttcttcatctaccacaggaaggttccatgctttcgtatcatcaaacgtgcgcatcacctgttccatactatccgtgtcatagaggcgtgccggaatagccgtcatcagcttgcctaccgtaaaacgatgatacaactcctgccggaacatgatattccggatatcgtctaaggtaacaataccaatcagtattccgctcttatctgtcaccgggaatatattacgccgtgaggctgaaatcgctttcaccaattcacccaagtccatctccggatgaaccactacaaaatctttctccaccacattttccaccttcatcagagtaagtactgctttatctttatggtgagtcagcaattctccctttttagccaaacgcatggagtaaatactatgaggttcgaaaacaataattgtcagataagagctggctgctacaatcatcagcgggaggaaaaggtcatatccgcccgtcagttcggctatcagaaagactccggtcaacggggcatgcatgacaccactcatcacacctgccatccccatcagggcaaaattcttttcgggtaggtagtaagagaaatcaaacttattactaaaaaaagcgaagacaaaaccagctatacatcccaaatacaaagaaggcgcaaagataccaccacaaccgccaccaccatttgtcgcgctagatgcaaataccttgaacaagataatgagcatcaaatagagtaatagcaaattcccatgtccgtagaaaaaagagttgttcatcactgtatcccaatcggcattggaagtaccgttcagcaacagttcaatagtatcgtagccttcaccgtaaagcggtggaaaaagaaatatcaagatactcaacatgacaccacccaaagccaacttctggtaagggcctttcaacttgccaaacaaaccttccacagagttcattgcacgggtaaaataaagcgaaaccagtccgcaaaaaatacccagcatgataacgtaaggaatacgttccatctcaaaagcctgatcaaggtggaatttaaacattgcttctgttccggtagtaatataggacactgtagcagccgtcactgcagaaatcaacaacggaagcagagaagtcatagtcaggtctatcatcagtacttccagtgtgaacaccagtcctgcaataggcgccttgaagataccagcaatagcaccggcagcaccacagcctactaaaagcatcagtgtgcggtgctccatcttaaaaacacttcccagattggaaccaatagcggaacctgtcaatacgataggcgcctctgctcctaccgagccaccgaaaccaatggttatagaactggcaatcacagacgaccatgtattgtgccgcttaatccgtccttgtcggcgggaaatcgcatagagaattttagtaaccccatgactgatatcatccttcaccacatagcgtacaaacaatccagccagaaaaatacccactaccggataaaccagataaaggtagttggcttccgttgtattgaaattattcgtcaggaaattctgtatccagtgtatcagcatcttcagtatcaaagccgtaatagccgtaaagatacctaccagaaagctgagtatcaagataaactgtttttccttaatattcttttcacgccataaaaggaaacgctgaaacaaacttctcttctctttttccatatacctatatttaccaatctaaacgaaataaagaatttactctcgtatccatataaataagagagaaaatccttcgacaaactcagggcatacctgagcttacaaaaattaaaaataacgataccttttttagttcgttattttattcccggataatttttataacaccacccttatccagttttatgatgctggatggtttcggatgtcccatttcttcccgtcgatagcccactacgtaatcgaccatggacttaagttcttctgtgatctcactgtaatttgccggcgaaggttgcccgctgatattggccgacgtagaaacaatcgccttacgaaactgttgacaaagccgttttgagaacccttcattcgttacccggatgcccacgctaccatcttcggcaatcagattaggtgccaggtttcgcgcaccggagtagatgattgtcaacggtttgtccgccacttcaatcaagtcccatgccacttcaggcacatcctgcacatagaagtccacctttacaggagaatctaccaacacaagcatcgccttactgtccgagcgctgcttaatctcatacacacgccgcacagcttcttcgttggtggcgtcacaacctattccccaaatggtgtcggtggggtacagaatgactccgccttcgttcatcacttgacaggcttttttaatatcttctatcatttcttggtgtataaatacagtgattaacacgcaaaagtactatttttgcacggattaatagaaaagtttaagagaaaacaatggaagaaattcaatttaaccacaccctgcccatacaactacgatttaatgatgtcgataagttcggccacgtaaacaatacggtttatttctctttctatgatttgggaaaaaccgagtattttgcctccgtatgcccggacgtcgattgggagaaagacggcattgtcgtcgtacacatagaagcgaacttccttgcacagatttatggctcggatcatatcgctgtacaaaccgccgttactgaaatcggcaccaaaagttttcatctcgcacagcgggtgattgatacggaaacacaggaaatcaagtgcatatgtacctctgtgatggtaacttttgatttagaaaaacatgaatctaaacctctggaagaagaatggattcaggcaatctgtaaatacgaaggaagggatttgagaaagaagaaataagtgatttcccttctatttcacccggtgaatctttcgatattcagcgggtgtatattttttccataacttaaactgacgagctaaatttttataatcggacaaccccaccgacatagctatatctgcaataggctcgctactttccaatagcaactgtgaaaagcgttccatgcgtagattaaagatatactgataaatggaacttcctgtaacctgtttaaaatggatttctaataaccttctggataaaggaacctgccggacaacatcttccaccgttattttagttgccagattctgatgaatatacttcagtgcaaccaaaatataaggatcacctgtagaataaatatctgttgaaagccggtttgtgatagtcgtgggatgtatgacaacatcctcacaagaggcttctttatcccgcattaacctttctattaattgggctgcttcatatcctcccttcacaatattcagatttacgctggataaaggcggatcagacaagctgcaaataatttcatcattatctactccaagaacggcaatttcttcaggaatcttgatccccaatacccggcaaacctccattattttattcccttgtgtatcatcgcaagccattaatgccaacgggtgcagcaatgactttatccaactggctaacggttctgattcataataccacaaattctccaaaggctgtttctggtattcaaagaaattgtccccaaagcctttctcaattattctatcccggaagcccatgcagcgctcctccgaccaaacaacattctcataaccataaaatgcaaagtttcggaatcctttttgcaaaaagaaatcagctgccatttgtccagtcaacttatattcactcgtaatgttagggataaccgaaaaacgcgatttaaagtcctgagccaatgctattattccattttcccggaacaattcgacttcatcatcatcatcaaactgagcgataatagcatctgcctgccactttttagcccacttcagtactccaggtataccatgagattgtttataagaagggggcatccggcataccacccaaggttcccgttccttggaatattccaaaatccccctcaacaaattgtgagcaaaagcttcggtaaaatctgttaaaagaattagccttatcataatagccgcaagttactcacttatttcatgccatccaaaaagagctttatttttttctcaggcacattccatccagaaactgtcaaagtcacagattctacttcagcaacctgttgcggtacaacgcatttcaaagtccgtttttctccgggtatcaaagataaataattatcttcccaaaataccggataaagtaattcgtctttttcatctttcaaagacaaacgaataaaaaaagctaatgcattcggatcattctcaagtgcaacctctactattacatcattttcttcttgttcaactgtggcactcacctcacaatttacctgagataaatttgctaaaccggtaaaatcagccgacttcttaatcggagtgcgtacccaatcagtatttgcccaatcgtttacatcaggagcagcagcgagccaatagaaattatcgacaacataagctcctttttcatcattcaatttcaaatataaaaaggtattctcttttactgccggaacatcaaaggcctttaccactgtataaggagctatttccaatgttgtggtttgttgagtcacaactctactattacaatcatacaaagacataaccccttgcatctgaaccgttcctgcgctctcattcaccgcataaactgcatttttaccgtaatggtatatcaattgttgcggcatattagatttcttcacagaatagtatgcagctgtcggaatcagataatagtcatacaactgccaatacaatgaaggccaggcagaattaagcatccactgtacaatacctgtagtacgaggaatattcacacggaatgcctcaaacatagtacgtgtaccttcataattcaaccaatctgctttccgcagaaaatcatccaaatctttagcctcgccataacgagttgccatattttctttcagaacttccaaagaattcattgccgcatctgaaacagtgcaatgataatcccattctttacccaccggccaaagtttatcagtcggaatcattctccgtatggactcaattacaggtaattgtgcaccaattcccgtctctgtattaaatccaaatgctccgcccggtgctttttccgaataccaataattaggagcaacataatcatacggtccttccattttcatacccgtaggtccggttactgtactggtgagttccttagcagcacctatataagggcgatcatctatctgagaaagataagctttataccgtttctccagttcagggcggggaatcatatcacttcctacaaaccatgcaataatggccggatgattgcgcaaccaaagtacctggtcgtttaatgaacgagctatcagattcatatctttttcagacttaatgcctccaaactcatcacatgaagaaccgagataattatcccactcccaatgacagctccatcccactaataccaataacccgtagcgatcacacaaatcatacacattctgcgaagttccccaaatattttcaaatcgaatagagttcagattcatatcacgcacatactgtacctgtatttcatttgaagcaggagtatcccgcaagaaaatatcatctgtccaaccggcacttcttaccaatactttcttaccattcaataggaaacctcgatacccctcttccgtgaaataatccctaacctcacgtacaccgaagtttatagtttctttatccgataccttaccatcaatctcgaaagccaagtccatgccgtacatttccggtttacccatattatggcaccaccaaagacggggattcttcaaatgcaatacatcagcttcctttgaagtcacccttactatttttgattctccggcagcgagtgataccggaatactaaacgtcttaccttccagtgtcccaatcagctgacctttcaccgcttgttcggattcatttgtcagttgagtttccactgtcagccaagcctcatccaaggtctccgtatttactttagaatgaacagcggaattttccatactcacctcatcattcatcaccacacgtacttcacgaaagatccccatactctcatcagccgggcgtggattccaatctacaaaaccaatattcggttcaccgggttgagcccgaaaaacttcgacagccagtatgtttttttcccggacgatcttcgttatatccaatttatgtcgacgaaaggtaccatatacagaatcacgagtagctaccttttttccatttagccaaatattagcagcataactaatgccgtcaaaaattaaggcaacatgctgcccttttgtcaaagacggcaattcaaattcctttcgataccaccatgtagtgtcgaaaagtgatttatcaatgttctcataatttgttccttccaatacatccgtatatattccattccggattaatgtccccattacagtagaaggcactactgcatcataccactctttttcttttatttgagagttcgaaacttcttcacccggtaaaaatatcttagccgaagattgtactttccaaccatccgaaagtagtaaaccacctgcagataattcttttctttcacacgaaactattgtcattgcaagacagccggacaatattaacgatttaattaaattatttttcataagctcttgctctaaattattttcaatgttttcccaccaaagcagatgctcccaacaatgctacatcttctatttctgtaacaaaaattttcacccgcttcactgtttccgtataaggaaaagcctgcatagcttgatacatggaatgcttataataagtaaatgcggatgagattcctccacctatcacaatcacctcaggatcatacgtaaacaacacagccttcatcaattcacctatgtgagacccaaacacactccaaatttccatagtcttcgcatctcccgtcgcagctttttctgccgcttccttccctgtcagattataatatctgacaaaaaatccactactacaataatgttcaaaatcatgagaaaggtaaggcaatgatcctatttcgcctgcaccagtattctgcccactgtaaagttcaccatttataataatccccgtcccaacacctgtaccgatagtcatacccaccaaattccggtattttcgtccttcaccaaaaagttttactcccaatgcaaagcaattagagtcattattgatataaaccggcactgaaaaacgttcctgcaataatctctttaacggaacttccgtccaagaaggaatattcgctacattatatacgataccttcttccgaatctaccaccgaaggaacacccacgcctatgcctgctacttccggacacatcaccctatctatcaagccctctaaccgacctaatacttcttcatacgttgctttagagggacaagtaacaacttctttcctaactaaagaaccattttccactaaaccaacacgtatattggttccacctaaatctatacctattttcatttccgataatttatactcaagaaaggcaggcagagaatatcaaaggggggagttccctgcctttcacctgtcttactgtgcgtgttaaagttatttttttctaaggcaccagaaggtggcatcagtccatgcttcagcatcagaaggattccaacacagtaccattgtatcatccgtcaattccagaatctcaaatgtagtaattatattggaatcatcataaaaggcatgtccacttaacactgatacacctgtcaactttagctgaccgatagaccattgttcaccattatccggattattcttaacagccgacatatcaaaggcaaaccgccctttttccaggatattcccatctgcatctatcttagtcagattcggaccaccattcagatcgaaaatcaattcacagtccaaatcctccaactcctcaacaggtgttacgtcccaactcggttcaagttctgtcaaccaaccacctgtaccatatactgcatcgtagtcttccaaatcccagacccacgctttaccattagttccggaaccggccaaaagtccccattcttcagctacaggatggtcgatttgtttaatagtcactgtccgggtagcaatcacttgccctccatcacaaaagccaatgaacttaatagtttgttcgcccagaaagggtaatgccgccgtagcggtctgctgagtagatatacctgtaatatgatcccaatagctacctacaccaggtgtattattggtcatgatgatctcatttccaccatctgtagtagcatgcacatccagtttcaattcactttcactaacaatacctcccatttccttattatcaaccaccggatcgcatgctgccagcagccatatcgataaaattcctatcgctatattcttcatatccgaaaattttaaaatcattaattcatattactctcatttccccagcccggattttgttccaatataccggcagacaagtcaatctgtgtcttaggcaatggcatcaatcccttggtagcttgaagtctttgtgctatatctcccatatccatacgggtctcgaccatattatccagtactttcactccattttgctgacttaaaacttctgccgcaataccccaacgaagcaaatcataataccgtaaaccctcaaaagcaagttcccaatgccgttcatcacgtaatgcttcatccgaataggtaacaggatctaatcctactctcgcacgcacacgattcatcggagctgcatcccgtttcagttcagcagccatcaacaatacatcagcaaaacggataattaccaaatcctgcgtattattcaactgataatccgaatcaatttccggatagagaatacggctatagtttacactctctccatcttcattataagcattgacagccatatactttttctgccaataaccggtttcattcatctgcttatcacatccccagccatagtcgggcatttccttttccacactcaaaatagatgcctcacgacgaatatccttcgaaggccatgattcccataatcttgagttcaccgttcctattccccaaccaattccaaagggaaaaatatcatccaaatttgccggctctcggggagatgaataaagacaaacctcattgttataccaagggttatcccaagtggcctttgctgaatagcggatagcaaaaacagtctccacattggccccatcttcccctatccagtgcaaatcattatcttgtgcatatttataatctttcttggtataaacattgctataaggccacaaatttctgaaatcacctatcaagtcatgtccactgttgttaatgcaatcatccaaatacgtgatgacatcggttctggataaagtactgttatccggcaatggcatactttcctgctgataataaccggtatagaacaaataagcacgcgccagtaatgcttcagccgcccatttggtagcccgtcccaactcagaattattggcagcactatatttaacagaaggtaatttttctatagctgttttcaaatcaaatgcaatctgtgcatacaactcttccgcagtagcgcgaggcacattctcaggttcagaagttgtaagtaaaggaacagtaccaaacagccgacataaatcgaagtaaaaataagcacgcaaaaaatgtgcttgcccctcaatcttattacgggtttcctggctctcccaactaataccatccaatgaattcaataacatattactacgataaatagcccgataatcttgtttccaaacatcagaaaacatgttttcatcaactttcttcaaccgatccacagcatgcatgcgtctgtcatccggaccaccaccaccgaagcgatcgtcagaaagtaattcagctgtcagaaagaaaccttgtccatcctcacccggagtcatttcacgaagtaatgcatatatacctgtcaatgcagtttctgcatctcccgaagttttaggaaaattggagttgtcctttttggtcagattctcagtatcaagaaaaccctcacagcccataaagaaaagggctactatcgaaaatatccatatttttttcatactacttctcttttaaaatttaatatttgcccctaccatataggttcgcggactgggataaaagcctaagtcaatcccagacacccaattttgataaccaccatagcccacttcaggatccatacccgagtaaccggttatagtaaacaagttctgtgctgccacatacaaacgaagttgtttcaacggcagatttttaaataatttcttgaagtcataacctattgtcagattctgcatccggaaataatctccatcttccatatagagatccgaaacatactgccagttagaatgagtacccgacgtcagacgaggtaatctattagatgtaccttcaccatgccaacggccaaatatatcagatgtatagttctggcgtgtgtaatctacataagaacgataagatttcattatttgatttccaaatacaccattcatggtcatacttatatcaaaacctttataggatgcggtcaagctcaatcccagattataatcaggattgggatcgcctatcataccctgatccccatcatcaatcacaccattatgatcgcggtctacccagattacatcccccggttttgtcccatccaatttagcacctttatagttagcaatctgttcttccgattggaacactccatctgtagaatagccatagaaatatccaatgggatagcctacttgcgcacgatacatttctgtagtttggttactcaatacatccgggtccccatgaataataccttccgcattggcaatgcgcgttacctcatttttattgtgtgccaaattaagagtagcactatattcaaagtccgaaatatgatcattccaattcagtgatatttcgtacccctggttgcgcacatcaccaccattcacaaacggggctcctgtaccaaaagaatccagcatcggtgcaacaagtagccagtctttcgtatctttaatataataatcaaaattcagtcccagacgattattcagaaaacgcgcatccagcccaaagtccaactgctcggaagtctcccaggtaacatccggattagccaaaatatcaggatagcctccgggtgtcagaatcgacttatccggtccgaaagtataatccgcgcccccaaacgcaatcgttgaaagatattgaaagccgtcaatctcctgattaccattctgtccccaactggcacgtattttcagaaaatccatccaagacttggcagactccatgaacgcctcttccgaaatggcccaaccagcagatacagacgggaaatatccccaccggtgtccacgggcaaacttagaagatccatcaatacgtaacaccgcagtcgccatatacttgttagcataatcataattcactctgccaaaaaaagaagccagcgcttccttgccccatggatatccataaaggctggtacgattagtgatagtgggcgtattactcaggtaggcatgcttgaagtcgtcaaagatagagttgatgttacttccacccaacgtatcacccaagccatgcttttctatagattgacctatcaatacaccgaaactgtgattatccaacttgaaatcatacgttaccgtattttcccacataaggttgccacccatagtcatctcttggcttacactattattatcattgaaagtattgcttgccagcttatagacaggggtaaaattacgactgttatccgcataaaacgtatagccaaaatttgatttaagttttaatccggttatcggttgaatagtcagaaaaatattcccttgtaatgcgtgagatttgcttatattctgcccatttgcataatacatctgtccaatgggattagcttcacgtatttcccatggaatggcataatgataattaccattttcatccttgttcggtaaaaaaggattagcatgcaacatattacgaatgtcattactccaagtatcatcaatggcaataccgtttctttcagaatacgagtaggtcagattttcacctaccttaatgatatccagttttcctttacgatacaaggtatgttcggaattgatacgtgctgtatatcgggtatattcaggttgtgacggtgctccaagaataccttcctgatcagtatatgccaatccgatagaataaacagattgttccgtacctccggtaatattcagggcatgattctgtatcggtgcattctcattccgtgattcatccaaccaattggtccctttccaagttccattctttatagcttcccaatcaggaaccagcgacgcataatcataatcaggtaagccatccatcatacgtgcctcactcataatcattgcaaattcctgtgcattcaatacatcaggcatacgatagacattctgcacaccataatatccatcataagatatttccgctttaccggtatgtccttgtttcgtagtcaccagaatcacgccattggcagcacgtgaaccataaatggcagccgaagcagcatctttcagcacatcaatagattctatatcggtagggttcaggttattaatatctcctcccggcataccatctataatataaagaggtgaagctgaacctgttgttcccaaaccacggatagttactttaaaaccttcaccgggcatccccgaactctgcgttatattcacacctggagtttggctttgaagagcccccaaagcattcactgtgttcagtttggctatattatcaccttttacctgaacagtagctcctgtcactaatttctttttctgtactccataaccaaccactaccacttcatccagcatttcactgtcctcctctaatgcaattttcaaaggagtcgtggcagagcttactttaacagattgccctaaatatcccacataagtgatagagagttcacatggcaaaggaacagatagagtaaaatttccatctatatccgtaactatcccgttagtcgtccccttttgaagaacatttacgccgatcagcggctcactgtctttagcagcaaccaccgtacctgagattttgtaatttgtttgtgccgtaacgcccatacaaaccaagagcaacaaaaaacatacagataaaaaaggtacccgaacagatacattttcctgcaaatcagattggttctttttccattgcataagatacaaatttagtgattcataatattattccggttggttagcccggagacttatataagtctgatgtctttcacattgacaaatgtaggcaagtacacacgatttctgtactccttttacgtaggaaagtcttcattttgcgcaaacctgtttttataagttagatgattgtttaattaaggtttgatcccctattcttttttaattatgaaataaaaaatacggttcacacaaataagtcatatacttattcatgtaaaccgcatcttcttctttttacctttaatcagttacttactcaactatataccagtattatgctctcttaatagtaatcttgagtatgtgaatacttacatattcaacagaactatcttattggcagattcttctttccccaatttttattaggattgggtcccatccacaattccaataccccacctttagcaaacacttcatgtgaaaaccaaaatgtatctagtttttttccattcaagtgagccttgtttatatacatattctgatctgaattattatatgtccgaattataaacttaccagagctgctatcaggataatagcgtttatccagatgaatagttatctcattgaaaaccggtgaggtaatctcatagatcggttctgcagcagcagttccacaagcactgaaaagccctatagacatcaatgcactaacgcctcccatctgtccctggtcttcatcatgtcctccataacctcggtcaggtgtaattgcaccataagcctgttcattgactctacgtacccagtattgagtaagccatggtttcccaccccaactaaatgcatgtgcattggaacatccaggttgattagcataacttacatatccggttccataaccaaaaacaaaatcctgtggtgcggcttgttcaaaagcatggttaagcttattacagaattcattttctcctcccatcaaatcagtaagttccggtaaagcatgcgagattcccaaagtagcctgccacgcatttgcttcaatatacccatctccttttaacggatcctcatgaagccattcacctttatcattttttggaaaaatcaatttctgctccgagtgatataactttttccatcctttagaacgggaccgaaaatattcagcctcattattaagcccaagacgaatagccatttgcgataaggcccagtcttgaaagttagactctatcgtcatccctgcattacccggttgataaccattctcaagataatagtctcctatccccatcataccacctggcatatgattacgttgcatagtcttgaaagcatgcataggatcgcatttagtcatcaaccctttattatatgtagatacaatcaaaggggtagccgggcagcctgacattatataagtatagcctccggcacaaggtccacgcggaataagtcctccattatcagcataacggataagtgaagctgacatttcatccatcatctcaggccatcccaatccccacaatatattgagattccattgagtaagccaaaaagcatcggaattatacatatgatgcaaaactttaccatcttcaccacgtgggagtgttcttgttttcggatgaatattacgagtataagagtagtaacgttccccttcggtcaaatcaggatattctccattgacatcatctattttatgtcgtccaagcagtacatgccataaatccgtatagaatttggtacgttgtttttgcgaaccgcctttgacttcgattcgtcccaaccatttattccattcatcctgagatgttttctttactaaatcaaaatcccaagtaacggcatcgttctccaaattttccctcgcattgtccacgcttacatatgatatagctgtacggacacatattttgtcccctgtttttactctgtagtgtgccgaaacaccggaagttggtgaatctagataactcaactcttctttcgggtgccttctagttataatggacgatccctgaagtgtgtctatatcactataacgctctttgtctcgccatccatccaatctctcaaaatctttatcaaagcgtatcacaaaatgtaccttcacattctccggacctccccaatgccgtccgtatgtatcaaaactaccttctatttcattgttgaagactttcttcacatcagcattacgcatagtggtagaagcaatataaccacccaagtttacaagaatatccgcgtccgagtcctgagtaaatgtaagccgatacataccagttctgtccgtcgctgtttgctctacccaaatcccgtaatctttaagatacattctatgatatcccggttgcgcaatttcttcttcatgcatgaatgaggacttccagttttcttccccgagcgtaggatctacatttcctgtcgtaggcataagcgtaagcccggcaagcacccaacaatgaatttgagggaaccctagaacttctgtggaattataattatatccgccgccaaattgattgcggttgcgtgtcattggggctgctccgatcataccaaaaggctgattacctgttataaaaaagaaatatcgtccttttgtagtttcgataaacggatctacctgtgaaacaaagtcttcgcatgcttccgccggtggataaacttcaatttctgacaggccaatataagagccaacagcatcattggctacaaatttcacccagcgaacctttttcggttcaaactctacaactttcggagtaccatcattaggaatccccaccactccgattctgctgccgtcgctaaaatacaaatctcctccggctgtatgagcatctttattcggacgatcatacaatatgattcgtgaaatcgtaacttcttcttcccaatcaagctgtatccatggaaaaggtaattgctgccagtgaggcatgattgcaccagaaacccattctcctgcattatccaaatgtataagtccatcaatcgccttagacgggccactgtccgagtctcgggacgacgaagctgttgcagtcgcccgaatggcaatattacctgtacctgcaaataccggtaatgccatccaaacgatacaaagaatactaatgatcttttttttcatatgtcatttattataatattattttttagcgtttcgcattcgaagttttaaggaccttcaaaatacaaggaagtacaagttctttttgcgccgtaagattaggatgaatgccatccggcacataattacggaattctttctcccctttgctgagaagtttcatccaatatccataatgatctatcaaactaatatttaattttttagcttctttccgatacatatcataataaagctcaatatccggtctttgcgccttatgctctgctattggcatattcatcacttgaatcagaatcgaacattcaggatataactcccggattctgtacaccatatattcaagatttagtcttgcagcctctatggaagtggtatacggcaaataggcatcattcattgcaaattcaatgattaccatatcaggcttatattctaaaaccctctcacgcagattttcgactccccaagtagaccacatcgcagcttgtgcactattaatgacttcaacagttccgggatagagcatattcaaactatcctctaacattgccggccatccttccttggatgcagaaaggctcgtaccatatatgacaattctctgattctcgccgtctacaagctttttaatgactttgtcttgagctgatagtggcaatgatgccactatcaaaacaattatcacagaaagatacttaatgtattttttcattttcctacccacacctctttcacatcagtaaaattataacgttttatactgctaaacgattttgatgtacgggctccgaaacgaaggaaataaggccgtttgtaagaaccgtcaatcttttgaggatctcctgttccaccattccatccattagggtaaccggtccgaattgtcaggatatctccgagagtataattccgcaaatcggcctgtgttaaattggtagataattttgtactatatgcccctggagcattgctcacataatctatctggctaacaaacaaccatgcttcctcaagaggctgctgataatccggattatcagtaccccgggttattttcacctgaacctcaaaggttccatcatctttcaatacaggttctcccacccattgtacccggagcagcggttctacaaaataattctttttcaccactccttcaaggtctatgatttcttcgggcagtggaacaaaaggtccctctggaatgatcccataagtccccttgaagatcttagtattattgaaagtaccatcacgtttcgcaaaaaaatcataaggaacaggattgtcactccaactgtattccataagacggatacggataccaccatgttctatagccgtacttgcagctgtttgaattggctcatttgtatctttatctataaatgcaccttgaaaagtttctgccggagcgtcataattatcatttccacatgaagtgaaaatgaagatagctgctaatgtccaaaaataatatataatctttttcataattctgttgtatttagtaggataccacaatccaattaataaccctgattctgtctacagttagaatttctcgtaatttcagccggatcaattttctgataatattgtcgtggttcaaaagagaaaatatagggttccatcgtcacaccgttttggcttcttggctcggtatacttcacatcaagaaaataggcatcatcttccaccgagaagaaaggacataggatgcgatacttgcggtctttttgttcagcttccgtatctattatcctccatcttttcagatcccaatatgtcttattctcaaaagctaattctttgcgacgctctgtgcgaattatatcacgacttttttcatcggccaaaagagtcgaggatagttccgttgctccagctctttttcttatggaattgatagcttctgttgcaatagagagatagctttcccccttcgcatcagcaacttctcctaaagaaacaagttcccatgccgcttctgcacgattcagaaggacttccgcataacgaatctctatccatggttgagatgaataatttcctccattaagagccttgggatcgggattcatatattttctcaaatagaaaccactaaggttaccataatcccaattggaaaccggtccacttgcgccggaacgtctcatttttccagcgtatatatctttcttatccggatatctgtcagcaaggtcattccaatatttcgaaccacttttcaactggacaagataagaatcatcattattttggctgaatgaattgactaatttcactgtgttttcatcaactgccacattataatttgaagaataattatcagattctttcaagagagcccccatcgtgttgacagatttacctgtcaatatacctctccggagttcaatagtttcacccttgaattcagacattggaagaattaccgtcgcagccaaacgcggctcacaattctcaaaagcatctaacggtgactcataaagtttatagtgtccattatcatcaaagttctcaaatttcccattgatatctttattgtcaaactcaaacatttccacgaaatccaaagttgggcacacctctgaattgttatctccattagatgtctgcatcggttgagcagaattatcgaactgatgcaaaaattcaggatcaatatagtatcttccaaagatagtttcataagtatcctccaggaatattgctgtgaaattatctatttgagcttgcctgttatttccggaccatttatccatatatagacgatatcctccctcatctactatttgagatgcttcatatgctgccttgaagtaaccgactgccttctcttgaggaattccgcatacacgtactccattaaccggagcataatttacagtattatacttagcaatagaaccggcatgaagcattatgcgtgacttaagagctgccgctgcatatttgttggcacgtcctttttgattgctttccggaagtaattctatagctttatcaagatctgccccaataaagtcccaggtatcctcttcagaagctctgaaaagctttgtatcctcaaacgatactgacgccggataatctatgactttatcaacaaccggtacaccaccatagcgtttcacaagagaataatataccatagaccgtatgaaataggcctctccaagaaaactgttagcctgggcttccgtatagtttgatgcatatttaggtaaaacctccaataataagttagctgcccttatataagaataagcctgattccaataccccacagcctcgtattcattaccggcagcatctctgccaatagcctcgcctgtacgacatgaaggctgagcataaatcgtccacgcataattaaagggtggattaccttcgtaagcataacggaaatcttctaatggaagattcatgtacataccggaaatataactaagcgttcctgcctcattggcaaaaagatcctcctcgttcacaacattcacaggagacatgtccaagtccgtgcatgaaaacatgacactggcacacattattgatactattgttttcagtttcatattaattttatttagaatttaaagttaagaccaagcgtaaatgttttactaatcgggtaagaataagccgtatctgcactatattcaggatccaaatatttcaagctcgtaaatgtcagcaggttatatccactgaaatatactcttataccttgtacatttatattttgcaaccatttcttaggcagactataaccgatttcaagattcttcagacgaatgtatgaggcattctgaagatggaaatcagaactctgatcaggaagcgttcctgtatatgcgtaatgccccttaacccaatttgttgaaggatcatacggatttgcaagaggatcttccggatgccagcgatccatatattgagcaacagcaccatctccccaaagaggctgatacagaataccttgtggagaaacatacgttttacctgctccttgaaacaacattgaaatatcgattcccttccattgagcagagaaagttaaaccaaagttaagaagcggaacagaacttgaattaacaagaggatgtttatccagttcagagaatacaccatccccattccagtcaaggtattcgtaatctcccaatatagagccccttgctataaagataggattatgccagatttcatcccaactttccaatcgtccggctccctctataccccaggttatattattataacgattgctggtattatttttccagttttcatacgagttaccggcacggctcgtttctacatgcgtatttttagttcttgtataagcaatgtttcctttaatttgataatagaaatcgttgacatggtgtctgtgagtaagttctatttcaaaaccttgggtcaagtcgccattaagattttcctgaggaagtgttgctccaacaacacccggaagagaaccggcacgtgtagtcaaaagtccacttcgtcttctattaaagtattctgctgttacgccaagaagtccattccaggcctccgcatctattccgacattgaatgttcttgactcataccaagtaattgctttattgggaatgccggtgcttgtggaagtactgatatattgcccatcaaaaaccgaaccaccatctgatggatatttatatccggtaatatgttgataacgagctgcgctatcatctcccagtactccccatgaagttcttatcttgaaattattaataaaactaagtggagattctttccagaatttttcttcagagattcgataaccagctgatacagaaggaaaaaatccccaacgggtctcctttgggaaaagagaggaagcttcgtggcgaaaagcaaattcagcaatatacttcccggcgtaatcataattcaaacgtcctaccaaagctctattagcattgtcataaagaacggactgatcagcattttgattaaattcctggttggtagtaatacctgcaaaaactttatccatgtccaaagcaacctgtcgacttccatagaaattatcgccaactttgtgttgattctctataaggatcaatgctcccacattgtgcttgccaaaattattgtcatagctgaggcgcgcctgccataaattattctgtttagaatagaaataacgggaaatcttattaggagctgccgtttgtgcacctttcacaatggcattccctgatgtatcataaagattatatgctttacgatattcatcatcattattagcaatatagtcataactatacattccgctaacagaaagtcccttaacccatgggatatcccatgtaagagatgcattagactgaaaccatttactctgataagtacaatgtccggtcagatcggtatccatcaaagcagcaggattgtagcctgccggattaaagcgacttgcatacatacctttttcctcatcataccataccggttcaagaggtgatgacagccatccttcataaataatcgcacctgaattagctggagaagattctctctcatccatcattcctgagatgttaagatcaaacttcaaattgttagtcacattagcagaaatgttacttctaagattgaatttttcatagttgatagcattggaacgcaagtagctctcctgatattgatacccggcacttgcaaagtacgtcactttatctcccccacctgaaatatttatactgtgctgagtttgcggagctgagtttctgaaaagttcatttttccaattcgttccccgcttgacaccattgcgataatcagctatctcctcaagagaatatgtcctgttggcactttcatccacattgtggatcaccttctcgttgacaagagtcataatatcagctgcttctacaagatcaggaaagttcgtcggcacctgccatgtcatatttccggaataagacacattcgcatgtcctttagttcctttctttgtcgttataaggatcaccccattagcggctcgcactccataaacagcagcagaagcatccttcagtactgaaatactctcaatatcttctgcatctattttagccatattatctctcggcacgccatcaataataacaagaggagttccaaaaccacgaatatccatcttattggtgaattgcccgggttcagaagtattttgtacaatacgtaaaccaggaatcttaccggtaagcatattctgaagattctcatttttcgtagttactatttccttattctgtatagcagataccgctccggtcatagtcacttttttctgtacaccataacccacaacaaccacctcttcaagctctacattatcttcttgcagcacaattttatacttttgaggttgggcaagtacagtgaattgatactcccgataaccaatactggaaaccttcagtactttccccacagccgcttgcattgtaaagtctccatccacattagaaatacaaccatttgatgtattggcaggatcaataacgacagcaccgattacaggtattccggcagtatcaacaatagtaccggaaaccgtcattgtagtcccattttgtgcatgaatctctatcgctgatgcgataaaagccacgcaaataaaaacctttaaaaggttagacaaatgttttttaagtttcataaatacgttattataaggttaaacatcatttttagttaataataaatatctaaactcattcaaattctttccatcccgataaatattcataagagtatctaccgttctacacgaaatgtagcagacgatctaatatcatcagaagcagtacctacaagaatctgaaatttacccggctccacaacccattcatggcgttcaggagtatagaaactcagtgcttcttttccaattgtaaaattcacttttacagtttctcccggagcaagattcacctttttgaatcccttgagttctttaagcggacgaggtaatgatgactccatatccataatatacaattgcacaacttctgccccctctctatttcccgaattagttatcgggattgtgacagttatattgtcagtactttttatagtttttttatcaagtgcaattttgccataatcaaatgaagtatagctgagtccatgcccgaaagcgaacaagggtttaattttctctttctcaaaccacctgtatcccacgaatataccttctttatattccacagtctcaccatcacccggatatgcattaaatgcatgagcggcattatcttctattttcacgggaaatgagaaaggcaattttccggacggattgacttcaccgaacaaaacatccgctattgcattaccggcttctgtacctccataccacgcctgaactatagccgggactttcttatgccaaggcatagcataagcatttccacaaaccatcactgccactaaagacggatttactacactcaggtcggctatcaacgcatcctgttcatatggaaggttataagattctctatccactccctcacaatccatatgcagattcttgttcattccacctatatacaaaacaatatctgctcctttggccgccttcaccgcctctgtatgcaaactatcgtttactgattttgaagcagttgacgaataccccggttgatagtctacctcgatcctatcagcaacatatttgcgaatcccttcaagaggtacgacctcatattttgatttcgcttctgaagatccgccatcccgactcatcattttcacagcattctcaccgaccacaagtatcctatttaaagatccaatatttaccggtagaattttattgttgtttttcaaaagaacaatcccctcctcagcaattttgcgtgcagccattgcatgttcctccgaagcaagagttccccatggacgtccttccgacatattagtccgatacatcatccgtaaaactcgtctaactttttcattcaagaccttttcacttgtctcattttgtttcagcaattttaagtagggcttgccgaggcggtaattctgaaatgcctccagcgaaccaagatccgttccgaactccatatctaatccattatctatagcctcctgagtatcatgagtaccaccaaaatctgaaacaactactccatcgaatccccattccccacgtaatacatcgtttagaagataagaattatggcagcaatattgaccattaaatttgttgtaagctcccataacggcccacacaccagcttcctgtacggcagctttaaaagccggaaagtagatttcgtgcaatgtacgttcatccacaatagtatttatcgtcgtacgcttggtttcctgattattaactgcaaaatgttttacacaagctgatacatggttttcctgtacacctttaatatatgaaacagccatctttgatgtgagatacggatcctcacccatatattcaaagttgcgaccattcattggggttctgaagatattcacagcaggcccgagaagcatatttttatctctatacagagcctcttcaccaaggctttttccgaaaagatgtcccatctctggattccatgttgcagcaagacatacgagagcggggaacgccgtacatgaatcactggacatcccggcatgaatccatgtttgccataccatttcgggccgtaatcccgacggaccatccgacaaattattttccggcatgcctaatcttgggacacctgccgaaccgtagctcctgtcagcatgaagcaatccgactttttcttccagagtcatacgagacaaagcatcatcaatgcgttcttctatcggctttgaagcatctctatatataggtatctcttgagctcgaagactaacaggaagagttgctatcgcaacaagcatactaatttttcttattgaaaatttcatctgttttgggttaatattcataattcacactttattttagatattcatatattttcctgcagttataatatatttgatatttaattcctaccagacatacccactttgacctgggatacataaattcactttcattcagcaaaaccagagtttctatatatatgttcatacatatatatgcggcaaagataaataataaatttaaaaagcaaaaacaaaacaaagattttatatctaaaaaataaagaaagctcaaaagaaaatgataacagaatcaaaatacatctgttatcagaaaataacgaagaaggcacaaacaggaattaacaaactaattatcaacaatataaacacaatgatttgataacaaaagacagacataatatacctacaaagaaataaatccaaaaagttatcttatataaagtagcaattacgcgccctacaccaatgttcatacattaatatacaaagcaaaatcatttaattgataacctaaacttaaaaaacaatgaataacaagcaaaaaataagcgtctctatcgaagagacgcttataaaaattaaaatggtgagacttatataaacaacataaggtatgctaatcaaacttttgccggtatttttataccaaaagcacaatacgtcagatacagtacgcaaaccaaagtaactgtcactccacctattattcccacagtaccaatagcgaaaccaataaccggagtcacaacccctccaccggcaacggcagtaatcattaaaccggaaatctgatttgctttctctggacgaacctgcaatgccatcgaataaataatagcaaatacggacgaagcaaaaaagccaaccgcacctatacatatcagatttacaacatcattatctacccccatcaatatcaataatgaaacaatacaagccacaatattaactcggaaatatttcatctcggcaatatgagctaacagaaaagctcccagcaatgcaccaaccgtacgactaagaaaataaacctgaggagcaaacttcacctgctcatcagcccacccaaaacgaatagacatcaatttggagctaataaaatttgttgccacatctactcccacaatgaagaatatacctaaaaacagcaagaggatcgttcggtccttcaacaatgcaaatgtatcctctatagaaagtcccttatctgatacaatatttttctcccgttcaataggagttgccataagccaaacagccgacagcaatgttataaaaccaagtattgggaaacaataataccatttatccgctccgaagtaattcaccgccaagagcacaatctccggtccaaccaaagaagaaaccgcctttataacttgtccagccgttaaactactcgtcaaaaaggccttgttagtaaccacgttattaagcaatggattcagtgaaacctgcaaaatagcatttcctatgcccagtaaagcataagctgtcatacaagtaatactgtcataagccaacaatggtagaatcatacctataattgtaatacccatactgatgagcacggtattcttacgtccccatttattcatctgattcccaataggaatacttaaaaaaaggaaccaaataaagaccattgaaggcacaaaaccagtcattacgggcgaccaattaaagctgcgctgtacatagtcagaagaaataccaacaatatcacaaaaacccatcacaaagaaaccaaaaagcaccgggagagttgtcaatatagagttttgttttttcatattcacagttatttatataaaacacattattttttagcctacattcattaatgagtcagtcttttattaggaaaactatctaatttcaatgttaacctccctcctttcacaacctcctcaaacggcaacaatacagtttcctgctgtttaccattcaaagagacatcttgcaaataacagtcatcaacagaatgtctttttacttcaatcacaaactcttttcctgaatagtattccctgttcaggttaatagtcaccttatcaaacaaaggggcacctatctgaaatttcggattaatctctgtcagtcctttcacatcaaacaaccccaatgcagaaatcacataccaggcacctaactgcccctggtcctcatcctggccataaccatagccatgaattccttctaaaccataaaattcatccaagatagcccgtacccacttttgagacaaatagggcttacctgaaaaattaaacaaccaggaaatatgcagattgggctgatttccatgattataaaccgttttcagtccggcaaatgcatcaacttccgttccaccaccaaaaatactcttctgcgaaagcatgaaaatactgtcgagacgagtattgaaaatctccggccctaccaaatctattaattcatctatatgatgaggaacataaaatgtgtattgtatagcattaccttcctgaaatcccttccatggtgaaagcggattaaaatcctctagaaagcgcccctggctatctttagggcgaatcaggcgagtttccttgtcataaagttttttccagccattagaaagttgggaaagcctttcgtaatctgcctctctccccagctgtttggcaaactgcgcaatcgcaaaacaactaaaactatactccatagtatgcgaagcaccaaaacctgagcctccctcacgagtcaccatatcaaactgcttctcataaggagaataaccgagctccacaaacggacgcacatccatttttccggcaccttcaggccttccccgccattccacctcattcttcaatgcagcctcatagcccaattgtatatcaaaatcacgaataccacagttataagctgccgcaatagccagacctgtaaaatttgtccctactcccgacacatacttgctacacgcgattccatctcccagccaaccggcatcccggtaaaccagcagctgactctttatccagtcagaataatattcaggataagccaatgcccataactgtgtcaggttccagaacccaccccaaatagcatctgtattataatgctgatgcaccgggtttcctttttcatccagcgtgatacgtcctacagaaccgtcattccttggataatacccattgacatcacttgccaatccacgccccagaagcgcatgaaacagtccggtataaaacttcactttatcttcctccttacctccttccacgtagattctactcaatgactcattccacgctttcgttgcattcttccttgcctgatcaaaagtaacgtccttagcttccacctctctattaaaacgagcgttttctatggacgtatatgaaagacctacttttacttctaccgactcctgctcttccgtagagaaagtcaaataaagaccggcaccgggcccttttgcctgatatttaccagacacaaccttatccttcacgaacgtttccacctctattggttgtttatttaaaaccgccgaaaaatacatacgaacatccgcacctttctgataaatatccacatatacaggagaagtcacaacataaccttctaccctaccatcatcaaagtattgcacttcggcatcttttacttcaccgctttctccttgtttgttaccaatatcaaatatgaggttcgcctgttccgactttggataagtataacgatggaatcccacccgctgcgtggcagtcaattcggcctttactccataatctttcagaataacagaataatatccaggaaccgcaatctcatctttcttatcaaaacgcgaacgataaccactatccggatcatccagttcacccggaacagtctgcaacccacctacagtcggcgcaaaaacaataccgcctacctgaaactcatgaaagttagcaaaaccttcgatggaggtatgacgaaagtcataccccaccgcttgccaaccaccggaatttcccaaatgcgcatcagtagaaggagccaacttcgccataccgaatgggactgccgccggcgtataaaagaaccagcgacaatgcgcagttccaatattcgggtctacatagtccaccaaagttttagtgcccctggtatccgtagagcatcccaaagccacactaatccatatgactaataaaccgagttttttcatgatataaattcattaacgcgttaaatcctcatctatttacaccaaccggacacgaataaataccccatgattcatttggcttatctcccatctccaaaatcaattctccacctttcaacaattccgaagctgggaagaagaaacaatccagcttcttaccattcaacgtagcgctttgaacatatttattctttcgagatacgttctttgcctcaatcgtaaatgtctcaccacgaccatagcgcttacccaaatcaataactactttttcataaagcgggctggctatttcatagatcggatcaatgcggcaaccaccgtctgtctgaaataatcctaaagcggccataacaaaccaagcactcatttgcccctgatcttcatcacccaaataagcattggctacaccataaccataatacttatcaatgatagaacgagaccatttctgtgtcagccaaggctttttagcccaattaaacaagaaagcaaaatgcatagactgctgattgccctgaactactggataatcccagtactgatcattcggagcattatatctccaaggttcgctcacaacgaagccccaattcaagcggtcaacaaatgccttctcacccattatattaatcaaagccggcacatcctgaggtacaaagtagctaagctgccaggagttaccttctacatagtgatgattgcgcccggtttggaaagcatcaaagtccgctacaaagttaccggctgaatcacgcatatgcgcatagccgttttccggatttacagcattcttccaccaatatccacgatcattaaacgtaccatactccgtatatttacccaatgccttagccatctgtcccacagtccaatcatcataagagtactctaatgtattggaaaaacgccccaattcaataggaacatatttatacttcaaataaggaagtaaatcacgattgcctgcaaatccacctgctacatgtgtagccggagttgtctgcatctttttcatggcttcaaaagccttttccgcatcataatcgcgaatccccatctgataggcagataccatcaaagggatttcatgttcagctaccatcaccggaatatattccatccccgcaggtccctttgccaaccatccatttgcatcatacaacgccaactgagaatttacccatttggagctccattccggtgttaccaagttccagaattgattcagattccaaaaagtattccagaaagcatcacaacccagagccacatgatccggattcgtaaatttacgtaccttctcatcaggtgacatccattctccattcacgtcactccacagattacggcagagagcacggtatacatttgtatagaagcgtactttttccatacggtcattcgttctgatatccaagcgattgagtataccattccatacgtttttctgattctgaacaacagcttcgaaatcccaaccgaacttatctgaaatctccttttgcagattttccgaagcatttgctacacttaccaacgaaatgcctgtacgcacctgaatcaccgactgcttctgcgtatcaaattctacataaagccctgcatctttcagatctttaccggaaatatgcgcttcattcaatatctggtcatccttccagccacctacctttttaatcggtgcatcaaattcaataacgaaatttacgacatactcctgatcagcatcatcactccatacatgtggacgaggggatatctgatgagaacgtccctcaattctgtaatcactcactttcctgacatccacatccaacagattatagtcatattcagcctgaatatgcaaatcgatcatcacacgtccatccttatccttaggaaatgtatatttctgaaaacttgctctttcagtagccgtcacctccgctaaaatctccgtatcagtcaggaaaactttataatatcccaatggagcttcttcagtcttcttgtcaatacgcgaacggtatccttcatccggacggaactgatctcctaccttcgtaaacagtttaccattggttggcatcatacccaatccccccattgtccattcatgaatatgactaaagcatcctaatgtctcaaatgtaggctgataaccggcctgccaacctttattctgattatccggactcaattttaccatactgaaaggcatccaaggccccggtgcaatcatccagcgagaatgtgccgtacctatctttgtatctacataatcagcaaaagactgcaacttctgcggagagcgtaaaatcgtacctctttccaatagctgttcattgacaaagacctgatattcactctttttctttttattcacagcaggcatcggaacttcaaacacataacgagccgtatccatctttgcagtaaaaatccttgttccatccagtttcacactcagttccgggtttccggataaatgttccacatcaaccagcaaaggttgtacatttactccgtccaattctatttcgtacccggcgggagaaacatcacgcagaaaagcatattcattattctgttccaaaacaagtccatccgaaccttccaaacgaatttgatcgaatacaatccacccaccttcaagtacagaaacagtcacaatgtttcctcctttttttaagtcggcagccgaaatgggaaattccaagacttgctctctggcattttgcaggttaccttccagtacttccatagcgtgccccttaatctcaaattttttttcaactgaatttaccactaccttaacaatcgaacggttcgggttagcatccaccaagtccaccaccaacttccattctccacgtttcggcagtttttcaactccaaataagatattagcatcatgggttctccaaccggaagtaccccacgtaccaccccaagtatcatcaggcccgggtaatacatatggaaaatcagtcttatcaacagaagtccctatcaaaaaataacggtcttcatagccaaagtcatgagccagaaaactcttatactcagaagggcctaaagccaattccgctccggaattatccgcagcgcctatctgccataccacttttgcagccatcgtatatagcgcacagcaggcaacgataaaaaaggatatcagttttttcttattcataatgagtattgaatttttaaatctaagtatctaattctatattctttccaagccttatcacaaaaaggcttattttgttatctctgaaacaatcttatttacttctaaaaatcaaactaacccttatatttcctgtctatctgttgcaatgcaaaagcataggctcctaaagcaatcgctttacttgctcccaaagttgaaatcgctactccgatacgctttatatggttataaagaatttctcttttggtaaaaggcacctgaacccaagtacttgtattctctaagaatctcttatggtcgtccgcctccatcagattgcaaacctccatctgcaaacaatcgaagtctcttccagaaaaagtagaaatggaacgacgcatttcacgcatcatacccggtaggatatatttcgctgcgccggacactcctccgcctatcacaaccataccatctacaatatgaagtgcactgacaatggcagcaccggccatctcccccaattcgtcaaaactcttcaaagccgcctcccgattacctgtacgagtaccttcagctatatcataaatgtctttgggcattagattttctatagtttctccactcagttccccatacacacgccgtactgcacgaatgctaacactttcttccgcaatcagatccgtatatttcttgttacgcataatccatacatcgccaccacaaccattatcaccggtcaacaaacagttgtcaatcactacgcctgcaccaaagcccgttcccaacgtaattcccagcaaatttctataacgcttcggattaccggcagcttcaagttcttcattgacagagggtaaaattcctgccagtgcttcaccataggcaaacaggttaccatcattattaataaatacaggaattccaaatctctctttcagaaaaggtcccaaagccactccaccacggaaagccggaaaattaggcaaatcgcctattataccattcttatagtctgccggaccgggaaaggcaaaactaatagctaccggggcatcttccaactgctccttcacctgagaaaatccccgatgcagaacagtcaggcattcctccaaattatccgacactgccggataacaaataggcgttacaatgtcctgatttccacaaatagctgaaaaaacaaagtttgtacctcctgcatccaaggtcatcaccgtacgttggtcatgtttatacatattatatcagattttattaatactactctccggtcaatatctcacataagctttgattgtcccacattcttgccccacagacttaccataaggagcaatcgtatattcacctacacctgccgggataataaaagtttctgcataatgcactacaaagggcttgaaagcatttatcggactttctataacagcctcttcaccttccaccaaattcagcacgttcacactgttattggtatgatgcgtaacaggcttggagaaccagtgacgatgcgtctcgataaactcattcgggtgcagtcccgtacattcttctctccagccatcaccctccgccacttgcgtaaagcgattagccaaatgcttattcacatattccgtatcacgtttccagtctatcacatccttccccctttctacattaataggacgaggctttccatccagtcccaaacgctgccaatcccaaagtttaaaagtgaacaagttcggagttgaactaatttccagtaccagcgcttcagaacccgaacagtgtactgttccgccgggaatcagataatggtcgtgttttttagccggcaacctgttcacatacctctccgtatcgaacacaacttctcccttctgcgcttcgcgtagatcatgaatcatttcatttttatctataccagtcttcaaacccagataaaccgaagcaccttctttggcatccaacaaatagtaactttcatcctgagtatagtacatgccaaagttctcacgaataaactgcgtagtaggatgtacctgcacgctcaagtttcctccgcccaccgtatccagaaaatcgaaacgaattgggaaatccttaccaaagcgtgcctctaccggttcacccagcaattctctcgatttcaacaacaccaaatccaccgacggcaattcaaagcgtacaccattcacttcaaaataaagactgttttcctcgggaacacaatcgaaacaccaaccataattctccttttcaggattcagcccgcacacctctttcatccattgtccaccccaaggagccggatcaaagaaaggaaccacacggaaaggagtcttaaccgtttcttctatacccttgaaaaaagtttccttatcaatcaacctcggttcattggcaatatgagtatccagccagaagtctaccctgccgaacaaactttctttatacctatcaagtattctccaatcgttgaaatagcctctcttatattgcaaagatacagcatcttcacgattatccactcctaaagccttcacttcatgtactcgaaaacgctgttgtatctcccagcgagccatatccacataaaccaccgtagcctcagccggagccaccatagcagcgcctgaccctacaataattactcttccggttgcatccgccacttgctttctagcctgttccagcttttccgcatcaaaataatcattcaaggtcaggttcgttacatagccaaaaagaacatcatccgtcatgaaacgctctgtcatcgctttaatctcatcctgtggcttcatcaaattgcgcgtattaataaataaggtaggagacaacaactccaactcacccgcaacttcttcctcacgcacacccgcatagaaatcaacagccacaactttcttaaccttgaaacactccaccagcaatgtatgaacagcatcccatccctgaagaattgttcccgtaatcttagtagaaggaaatctgtcgtaattcacttttctcataattatatatactttattttatctatatgtatgaacatatatgtattttgtgcaaatatatactctttaaaaataaaataaaagaatctacgggtatttttttaagaaaaaaaagaattatctttgtagcatcaaaaaaataaagaaaacaattatgcccataaagttagaccccaattcggagaaacctcttcatattcaagcagaagaagtacttagaaagctcattgaatcagaggagtacaagaacggaaagctacttccaaatgaagttctattgtctgaacaattgaatatatccaggaacactctccgtcaagctatcaacaagctcgtatttgaaggactgctggtcagaaaaaaaggtcatggtacaaaagttgtgcgcaaaggtatcattggcggagtgaaaaattggctaagtttctcacaagaaatgaaaatgctgggtattgaaattaagaatttcgaactccacgtcagtttcaagaaaccatctgaagaaatatgcaccttcttcaatatagacccggaaaaaggaaccaaatgtatggtgctggaaagggtacggggtaataaagaatatccgtttgtttcatttatctcctatttcaatccgaatataccgttaaccggtgatgaggatttcacccaacctctttacggagtactcgaaaataaatataacattattgtgaaaaccagtaaagaggaagtatccgcacgtctggcaggagaattcattgcggaaaaactggatataaagtcaagtgatcctatcttaataaggaaaagattcgtttacgatatcaaccaagtgcctattgaatacaatatcggatactatcgggcagacagcttcacctacacgatagaagctgaaagataagcaagcaaattcgggtctggaatatacccgagatgtagttgctccgtaccttctccggtacttcttcgttcagaagtacttttcagtgaagaatgtacggagcaactacatctcagatacaatccaggtaagaagcgaacacattctaaatcatcttttcaaactgataccttatatcatattttgcaagacaaaaaatccattttcctcattattgctaacagacacttcgatcaaagctacgcttccagaatattacaaccactgttttgaagatttacatcatctatccagagcaaacagatggttcatttatcctaaaccgaccatctattcagaccaatcgcacggtctttcttccctaaaaaagtaagtctcatttgccaaggctacaccctttactccaaaaggtgacaccataataactaaagggtgacgccatcactcacaaagggcgtcacccttctaaaaaacacatgatatttattctatttcgaagagaaacgaccactaagggaaaataacatttataaagaatatccagtaaacaagtttcagaaaacctcccatataaggatttgatcatcttaaaatctcatttttccatcaattactatcatttcacatctccccatcaaatattctctgcatcttttcgtccaccacagcaattggtacgaaaagaaaagattctaagacgttaggatttacattttgtcattctgctaatcattccaaatattgtacagatcaaatccgttatgtttttactgacttcataccagacaaatctgcctcttttttcataaatttgcccccattatggaacagcaacaatcatctttcaaagaaaaggaacgtacagacctgcgcgaaccgcagcacttcaaggtgatcatctataacgatgacttcactacgatggagtttgtcgtcaagatacttactaccatattctttaaatcggcagcagaagcagaaacgctgatgctacaggtacacaagagtcaatcagcagtggtaggcatctatacatacgacattgcacaatcgaaagtacagaaagccacccgtatggcacgcgaagagaattttccactccggcttaccattgcgccggaagaagaataagaattaggagaagattatggatatacaaaatacagtgcatgtgaacagcgcattcacctatgcacaaaaaaaggcgatatcttatcgccatgaatttatcacacctgagcatttgctgagtgcatttctggaacagagtccttttgccagtgccttaaatatgtgtttctgcgatacccaggaacttgctttctctttagagaattatttcacggaagaactggaaagcgttcccgcagacatggattatgaactggaagtttcaacccagctcaacgaactgatacaacatgcctatctgatgatagactattcaagtgctgaagcattgaacgtccctcatctagtgcaaagcatgctccagctcaaggactcctgggcatgccatatcctgaaagaagctcttgaagaagaactacccgaatttatcagccaactcatctcccgatatgaagaagtggaggaagaagacgatctgcaaacctctccacaggaaaaaagcgaaccctggcgaaactttgtaacttgtctgaatgactgtctgcaagaccacaatccactcatcggacgggaagctgaactggaacgaaccattcaggtgctctgtcgcaaagagaaaaacaatccgttgcatgtaggcgaaccgggcgttggcaaaacctccctcgcttacgggctcgctgcccgcattgaagcacgtgaggtccccgaacgactcctcgactgccgtatctacgaactggatttaggtactctactggcaggtacgcaataccggggtgactttgaaaaacgcctgaaaaccattatggaaggtgtccgtaatgaaggacgtgccattatctatatcgacgagatacacaatctaataggtgccggacgtacaggagacggttccatggatgcatccaacatgctgaaaccctatctggaaagcggagacatccgtttcatcggctctactacttacgaggaatacaaccgttactttgcccgcagcaaggggttggtgcgtcgcttccaacaaatagatatacttgaaccaagcattgaggaaaccatccatattgtagaaggactgaaagaaaaatatgaagaatttcatggagtaacctatcatcctgatgtaatcccttacgccgtcaaagcaagtgtccgctatatcagcgaccgctttctgcccgacaaggctatcgacctggtggatgaagcaggagcttaccgcgaaattcaccctatatcttccggagagcaaattgtagacaagacattgataaccgatgtactcgcccgtatctgcaaagtagatgcactcgccatgaaagaagaagataccacctcactggaaactttgcatgcacgtatcagtgccaaaatttacggccaggaagaggcagtgcgccaagtggtggaagccgtacaaatgtccaaagccggactgctggatgaaaacaaaccgctggcaagcctgctcttcgtcggtcctaccggagtaggtaaaaccgaagtagccaaagtgctggcctccgaactgggtatttccctgcaacgtttcgatatgagcgaatataccgaaaagcataccgtagccaaattaatcggttcacccgccggatatgtaggctatgaagacggtggtttattaaccgatgccattcgcaaaactcccaactgcgtactgctgcttgatgaaattgagaaagcccatcccgatgtgttcaatattctgctacaagtaatggactatgctgttctcacggataataagggacgaaaagccgactgccgccacgttgtacttatcatgacttcaaatgccggtgcacaatttgcccgtcaggcatctatcggattcagcagtcagattacagccggggaagccatgttgaaacaggtcaagaagaccttcaagccggagtttatcaaccgtctgtccgctactgtcgttttccacgatatgagtcgggaaatggcctcacttatcctcgacaagaagcttggggaactgagcagcaagcttgccgcacgccagatagagatggaactgagcccggaagctcgcaactggttattgcgacgtggattcctgcccgaatatggcgcccgcgaaatggatcgtgtgatagcttctcatctgaaaccactcctgatgcgcgaaatcttattcggttccttaaaatccggtggtaaaacttgcatacaggtaaacaaagatcaattagtcttacaactttcaacaaagtgatactatggtctttgcactaactgacgaaattacatttcccgatccgcactacggcgatccggacggattgctggcagtaggcggtgacctgtcgaccgaccgcctcatcctggcttactccaacgggatattcccctggtacacttttcaggagggaatgatacaatggtggtgcccgctggaacgcttcgtcattttccccgatgaaatccatatctcccactccatgcggacgctcataaacaaagggaagtacgatgtcactatcaatcaggctttcgatgaagtcatccgtaagtgcggagaactgaggatggatatggaaggcgcctggctcggtccggagatgatagaggcttacacacttctgcatgaacagggctttgccgccagcgtggaaatatgggaaggggaacagttagtaggcggactctatggagtcaccttggggcgctgctttttcggtgaaagtatgttttcactggttcccagtgcatccaagttagccctcatccacttggcacaattcttcggagagcatggcggcgtactgatagactgccagttcgaaactccccatctgaaatcgatgggaggaagatatatcagctacgaagaatatatggagtttttgcaatcataactaccttcgctggtcacaccagcgtaaattgcaaatgttcatccgtactgcgtccctcatcgtatgcaaagccctcccacgtaaacgctttcaagtcttcgggattttcaatgcgatttttaataatatagcgtagcatttctccgcggcacatcttggcatatatcacaattgtctttagctgcccgcctttccatacctggaattcgggagtaatgacacggacttcttcttctactcgcttccagtcgaacagatctctcatctcaccactggcaagattaacgagtatgccaccctgacgtttgatatccgctataaaataatccgtcagcaaaggtttccagtaatcaaacatagtcatccctcccctttcgggcaggcgtatatctccttccatacgataaggctttatcccgtccaacggacgaagcagtccgtacagaaaggaagtgatgcgcatgtgttcttgagcgtaacgaaaatcatcttcggaaaaatctttcggtactatacgtttgaacaccgcaccggtataggcacagatagcgggcattgcagaatttgcctccgaaaagaaatcctgatagcgcagataattctcagcggcaatcttggaatttatacgtaacagacgttccaggtcagcagctgaaaattgccccatatccaaggcattctgtactgcttccgcctgaaagtacggaacagttatttcagggactcctacagatgtgcgtgccgtcatcgttttggcacaagagatgaatgtcaacatatcacgttcaaagttttttgggaaacaaagataatacaaatcgaatgtagaactttcatgctcgcatgaaaaagttttgcgcaaagtttttccgcataaccttcctctgtttccatactttttcgtacttttacgccttgttggaaaaatacaggcttttcccgagagaaacgaaacctcttccaaccacgagactgaaaaaaggaaaaaacaatatataaaatgactcacaaatggaattatcaacccattacacccgaacaggcagagacaagccaaaagttggcccaagaattagggattagcccgattcttggcggattattggtgcagcggggaataacgaaggcacaggatgccaagaagtttttccgcccgcagttgcccgacttgcacgacccattcctgatgaaagacatggatgtggccgtggagcgccttaataaggcaatgggaaagaaagagcgtattctgatttatggtgattatgatgtagacggcactaccgcagtggcactggtctacaagtttattcaacagttctattcgaacattgactattacatccccgaccgctacaacgaaggttacggggtatctaccaaaggggtagactatgccgcagaaaccggtgtaggattgattatcgtactggattgcggcatcaaagctgtagaggagataacctatgccaaagaaaaaggcattgactttatcatctgcgaccaccatgtgcccgacgatgtacttccacctgccgccgctatcctgaacgccaagcgtttagataatacgtatccttacgagcacctttccggttgcggcgtaggcttcaaattcatgcaggcatttgccatcagtaatggcatcgagttccatcacctcattccactgctcgacctggttgccgtaagtatcgcttcggacattgttcccatcatgggagaaaaccggatacttgctttccacggattgaaacagttgaacagtaatcccagcgtaggtttgaaagcgattatcgacgtatgcggattgacagaaaaggatattaccgtcagcgacatcgtgttcaagataggcccgcgcatcaatgcctccggacgtattcagaacggaaaagaagccgtcgacctgctgactgagaaggatttctccatggctttggaaaaagccaatcaaatcaatcaatacaatgaaacccggaaagatctcgataagaccatgaccgaggaagccaaccagattgtagctgatctggaaggactcgccgagcgccgttctatcgtgttgtataacgaagattggcacaaaggtgttatcggtattgttgcctcccgcctgacggaaatttattatcgccccgcagtagtgctaacccgtacggacgatatggcaacaggttccgcccgttccgtatccggctttgacgtgtataaggcgattgaatattgccgtgatctgctggaaaatttcggtggtcatacctatgcagccggtctttcgatgaaagtggagaatgttcccgcctttaccaaacgcttcgaggaattcgtttcacagaacatcctaccggaacagacaagtgcggtcataaatatcgatgcagagatagatttcagggatatttctccgaaattctttaatgacctgaagaaattcaatccttatggtccggataatccgaaaccgatattctgtacgcataatgtctatgattacggtaccagtaaagtagtggggcgtgatcaggagcatatcaagttggaactggtagacaacaaatcgaataatgtaatgaacggcatcgccttcggacaaagttcgcatgtacgtttcatcaaaaccaagcgttcgtttgatatctgctacaccattgaagagaatacccataaacggggcgaggtacagttgcagatagaggatattcaacctaattaataaattggaagttgagagttaagttatgtaacataactctcaacttccaattcttcgtattatgactgcgcagctcaactcccaaccttcaactccctactctcaacttctcaaagagtactggggatatgataacttccggggcatacaggaagatatcatcaatagcataggcgaaggcaaagacaccctggggctgatgcctacgggcggcggaaagtccatcacatttcaggtgcctgcacttgccaaagaggggctttgcatagttattactcccctgatttctctgatgaaagaccaagtacagaacttgaaaaaaagaggaatcaaagcacttgccatctactccggaatgtcccggcaagagattatcatcacactggaaaactgtattttcggcaattataaattcctgtatatatcgcccgaacggttggatacggaaatcttccgcaccaagctacggaaaatgaacgtcagcatgataaccgttgacgaaagccattgcatttcacaatggggatatgatttccgtcctgcctatctgaagatagccgaaatacgtgatctcctacccggtgttcctgtgctggcactgactgcaaccgctactccggaagtcgtgaaggacatccaggcgcggctgtgcttccggcaggaaaatgttttccgcatgagttttgaacggaagaaccttgcctacatagtccgcaaaacagaaaataagaccggagaacttcttcacatcctacgccgtatgccgggtagtgccattatttacgtacgcaatcgtcggcgaaccaaagaaatcaccgaacttttaattaacgaagagattaccgccgacttctaccatgccggtctggatgatgccaccaaggatatacgtcagcatcgctggcagacaggagaaagccgtgtaatggttgccaccaatgctttcggcatgggtatcgacaaacccgatgtacgtatcgtaatccacctcgatttgccggactctcccgaagcttatttccaggaagcaggacgtgcaggacgtgacggcaacaaagcgtatgccgtaatactctatgccaaatcggacaaagtcacccttcataaacgtatcccggacacctttccggagaaagactacatcaaacaggtgtacgaacatctgcaatattattaccagatggcaatgggagacggtttgggatgtgtcagagagttcaatctggaagacttttgccggaagttcaaatacttccctgtacctgccgacagtgcattgaagattctgacgcaagcaggatatctggaatataccgacgaacaggacaatgcctcccgtctttacttcaccgtccgccgtgatgaactgtataaattacgcgaactgggagaggacatggacaaacttattcaaatcgttctgcggtcttacaccggagtattcacggattacacctttatcaacgagaattcacttgcggtacgtagcggattaacgcgacaacgggtgtacgacttgcttgtacgcctatccaagatgcgtatcatcgactatatcccacataaaaagacaccttatattatatatacgcgcgaacgcgtagacaggcaacatctgcaaatctcccgcagcatatacgaggagcgcaaggaacgttatgaagcccgcattcaggcaatggtagattatgtaacgaccgaaaccgtttgccgcagccgtatgcttctacgctatttcggagagaagaatgaacataactgtggaatatgcgatgtctgcctcagccaccgtgccgagactcccgagctttcctcccaacaaataaaagaagaaattaaagaattgctttgcaaacaacctctgacacctgccgatattgcctcacagatagaagcagataaagaaatcatctctcaatgcatccgtgaattgctggaagatgaagttctgaaagcggagaacggcatcataagcctgaaggcataagaaagggcgtacagtaaatgcacgcccttctccttattatatcaataagaattattccgttactgccggcttctcaataccttcgctggttgcacgttcttccatacgctggatacgggcatccaaatcaggatgagtagagaacagttgattcagcttactacttttctgtgcaccggcttcttcctgcaatttcttcagcttttggaaagataaagccattgcccagggattcttaccatgacttttcaggaattcatatccatagtcatcagcacttctctcctgcttctgtgaatatgtagagtttaccagagcctcacccaggtcacccaactgagaatcagacaacttagcagccgtaccaccttgtgaagaaataccatccttcaaagctgaagtcagcaatgccgtacgaaacccattcttagaatccttgtgtgccacgtgacctacttcatgtccgattacacccagcaattcatcatccgtcatgatatccatcaaagacgagaaaatgcgcacactaccgtcagcacaagcaaatgcattgacatctatcacataataaactttgaagttcaaaggaattccctctacatccgtcaagccttcagtcagctttttcagacgaattgtatactcattatcgtcggcacatacctgattatgtgtatccatccagtcgatatactcttttacatattctgccatctgagcatcagtcagagtaacagctttaacagctttagccgcacctttcagtgcttttacattaaactgagccattgcaggcattgtcacggccatacataacataaagaaggcccacttcatgaaaatctttttcattcttgtgtttttaatttagaaacgatgattaattaatataattggtaaatgtatcgcaaaagaacaaattttaaatgataccatcaataataacacggatgttttttctttttagaccgagttcttggtatggaaacaagatttttatgtaagtttgcaaaaagaataaaaacaaaacacctaagaaatacagattatgggattctttaaatctttcttctccggcaaacaagagaaaccggaaactgaaaaacagaaaaacgatcaaaagaacttcgagatattcaagtatgacggcatgcgtgcacaacgcatggggcgtcccgattatgcaatcaaatgcttcacggaagcccttgcacttcaggaagactttgaaaccatgagctatctgagccaggtttacattcaaaccaatgccctcagcgaagcgcatgaactgctggaacgcatggcaaaacaggaaccggaccacacctccactttcctcacccttgccaacgtatgctacctgcaagaagactatcaggcaatggcagacgccgcacaaaaagctattgaaatagaagaaggaaatgccatggcacactatcttctgggtagagccaagcaaggtatggacgacggtatcatgagcatcgcccatctcaccaaagccattgtactgaaagacgatttcaccgaagcccgcttgctgcgtgccgaagccttaatcaagatgcagcaatacaaggaagctaccgaagatatcgacgctatactctcccaagatcccgatgaagaagctgcattactgctccgcggtaaagtgaaagaagcagcgggacagcaggaagaagccgaaaccgattatcgctatgtaacagaattgaatccattcaacgaacaggcttttctttgcctgggacaactttatatcgtccagaagaagtatcccgaagctatcgcactctttgacgaagccatcgaactgaaccctaatttcgcacaagcctatcatgaacgcggtcgcgccaagttgctgaatggtgacacggcaggctctgcagaagatatgaaaaaaggattggagttgaaccccaaagaaatccaaggaatcagtggacaatacgacaatcagccaagacaaacggacgttttaggattgtagcgccatgaaaagcgacctctttatactcattgtatgccttctttttcctgcctacgcctgtgcggacacttctaaacatgctttagaagaaaacaggaaattgcttcactctttagatagcctgctggaacagcaggatctatttgtcagagtaaaagaggagcgcatcaagcaattgaaaatgcagtatagccgggtcaaagatgtaaaggaactctatgccatgaatagaatggtctatttggagtatcgggtttatgatgcggattccgccctgcactacatcaacaagaacatacaactggcacaacagaccaacaaccgtacctgggaagtggtctctttgcttgaacaatcatttgtcctcacctcctccgggttactgaccgaagccttaaaagccgtcagtgatattcaaccggaagaattaccccaaaatctccgttccgagtattttggcaggttatgtacactctattcccgcctgcgggattactccagtgagaactcccaactgtcggaacattacaataatctccaaaaggccttccgagactcggtatacctcacagccactcccgacgaattgcgctactggaactgccgggcatggctctacctgggaaccccggaaatagaacccgtcaaacaggcatttgaggaaaacaagcagacattgtctaacgacagccgcaagtattccatagctacctataatctctccgccatttaccggagtgaaaacaacgatagcaaatatctggagaacctcattctttcggctatggcagacatccggtctgtcaacggagatatcggctctttacaggaaatagcggaatacctatttaagcatggagaaatagaccgcgcctataactacatcctctattgttcccaaaaagccatgcttttccacaaccgggtacgaatagtcaaaatgtctcatttgcaaaatcaaatctacaaagcatatcaggaacagagccgcacacaacaaaagcgccttcaagcctccctgattgccgtcagtttcttattcctcgtactgatcggcgccttcctgttcatccgcaagcaaatgcaccggctaaaagaagccaacttgaagttagacagtacaaaccagaagttgtccgtcaatatggatgccctctctacagcacatcaacgcctggaagaagtaaacatgcaactgaaagacttgaatacgcaattacaggaagtcaacgaccagttgcgggaatctaattacgtaaaggaagaatatatcggctatgtattcaacatctgttccacctacatcagtaagctggaagagtttcgcaagaacatcaaccggaaactgaaagtaggccagatagaagatgtaaaagcaatgacggactcttccgcaacagcctccaacgaactgaaagagttctaccagaatttcgataccatcttcctgcatctctatcccgattttgtaggtgacttcaacgccttactgctacccgaagagcgcatcgaactgaaagaaggcgaactacttaataccgaactgcgcatacatgccttgataagactcggcatcacagacagcgtgaagatagcggacttcctccattgttccgcacaaacggtttataacaaccggcttcgcacccggaataaatccattatcccgaaagaagattttataaatgcagtgaaaaagctcggaaaatacaaagcgtaagccctgctctctactaccgattccacttaaagagtttacttccgagcctcttattttcagaaaacaacactaataatcaaacacttatcagttttaacagtttacttcgcctgtttacctcgcagagtaagcaacccttattgcgcatacctttgccacagagatccaaactaaaaacttatgttaactattaaacgaatcatgaagaacaaaagaaaagaaaaacgctcatgcagactcattcttgcctgctgcgctttgttactgttcatttcggtaaatgcatttgcacaacagcaagtcacagtcaccggaaacgtgaaagatgaaaagggagaacccatcatcggagctaatgtcattgtgaaaggcactggtacaggaagtgtcaccaatgtagaaggagacttttcattggcgaatgtacagaatggcgccactcttgaaatctcttttatcggctatctgaaccaggatgtgaaagtcaacggtacgaaacccgtcagcattatcctgaaggaagacactaagatgctggatgaggtagtagtggtaggttatggtgtgcagcgcaagtcggatatgacaggtgcagttgcttccgtaaataccaaaacactggaaaatcgcccgcagaccaacatcatccaatctttgcaaggtgctgtaccgggcctgaatatctcagtgaccggaaccaatgcggaaggctcttccaccaagacccgcatccgcggcgagaactccatcacggcagacaacaaaccactggttattctggacggtattccctttgatggtccctggtccgaaatcaatccgaacgacatcgaatccattgaagtattgaaagatgcttcttcggctgccatctatggtgcccgcggttcgaacggtgtcatcctcatcagctccaagagaggtgaaaaaggcaaactgaccgtatcctacaacacctacatcaccattgacaatcccatcaacttccccaacctcatgaatggagctgaattctggaagtataagacggaagcattgaaagatgccaataccaccccgcccactgaaagcaatcccgaaccgtggatgggatctatgaccgccacagaattgcgtatgcacgaagccggcatggataccgactggctggacctggcaacccgcaccggtttcaagcagcagcacaatatctctttccgtggtggcgtcaataagaccaactattttgtctcactgaactataccgatgtgaaaggtactgccgtaggcaaccaattcaaacgctacaacatccgtttcaaccttgatcaggagttcacttcctggtttaagttctctaccagcacccagttgggacgctacgaccgaagtggcagcagtgcttctttctccagagcattccgcatgaatcccctggcagaagcttatgacgaagaaggcaacatccgttccgccgcctgggaagattccagcgaagctttctctgtaaaccctttaagtagcctcaacaacaagagcaacgacatacgctctaaagtcatcaccaacaacgtggtagaaataaagttgccgttcgttcccggactcagctataagctcaataccggctatacgtaccagaacagtagctggaaacagtaccagggaatggatacttactacggcgcacgttccaacggtattctgaacaccgacgactggcattcacaagagtggattctggaaaacatcatcacttatacccgtgaattcggcaagcaccgcatcttcttcaccggtttgtattctgcacaaagctacgagaaagaaggcaacggaatggaaggcaaagactttccgaacgacgtgatgtactattaccagatatccaaagccgccaccatgtccggcagttccagctataccaagcaaaaccacatctctcagatggcacgtctgaactactcatacgacagccgttacttgttgacactgactgcacgccgtgacggttactccgcattcggcaaccaatccaagttcggtgtattcccttccatggctatcggctggaacatttccaatgaacatttcttccaggcaagcccattggctaaagtggtgagcaacctgaaataccgcctgtcatggggtaagaacggtaacgaagcggtaggcgcctacactacattgcctgacctttccaccttcaattatctgaaagatgaccataccccaaactacggtttctatccttccaagctggcttctccttcgctgggatgggaaactacacaatccatcaataccggtatcgacttccaactgtggaacggacgtatccagggaacattcgacatgtactggtcgaagacaagcgacctgttgctgaaccgctccatccccaccatcaacggtacgggaaacattaccgagaatatcggtgagaccaagaaccgcggtttagagttgcagattacttccaacaacattgccaagaaagatttcgactggtccactaccttcaacctgtcgcactacaagacaaagatcgtgaatgtaggtctctacgatgccaacggcaaccccatggatgacattggttccagatggttcatcggccagcccatcagcgtgaactacgactaccgcttcattggtatctggcagatcaccgacccgtctaatccgaacggacagcaagatccgaactatcgctactccatccccggatatatgaagtatcatgacaaggacggtgtgaacgacatcaccccggcagacaaggaaatcatcggctcggcaattcctaaagtaacaatgggtatgacgaatactttccgctacaagaatgtcagtctgagcgtattcctcaatgcccaactgggacagacagccaataactggctttacgacgtatctcacaactcttatcgccagaatcgcctcatggtagacttctggacaccggaaaatcctaccaacaagtacccgaagaactcactggatacttctgtaaacccgatgagcgcaggtttctacgaaaagaccgacttcctccgtgtgcaggatgtcacgctggcctaccgtgttcctcagcgttggttaaagaagatttccctgaaccgcctcgaagtatatatgaacatcaagaacctggcaacctggacaagctggaccggcctcgacccggaatttatcagcgaccaacagtccactccgcaggtacgttcattcacattcggtctgaaacttgatttataaaccgctaaaacaaagagaaacagtatgaaaaagctaaaatatacactgatagcactactcgtgctctgcatgaccggatgcaatgaatccagcttcctggaagaagatccgcgtgcttcactctaccctgaaaatctgttagtagattacagcgggttccaatccatggtaaccagcctctacggcatgatgcgtaacgaataccgccgtgccgatgcactcggtggcggtctgccgctcgttctgcactctgcatggggttgcggtgtggacaattcatggagtaataactcacacagcgactttaaatacatgtactatccgtcgcaaatcaaccagacggacttgcagatattccagaacatcttccaatggtgttaccgcatcatcaatacggcaaacatggtgatttcacgtgccgaaggcagtggcattgactggaaaggaaccgaaaccgaagctgccgcccacaagaataagatcatcgcacaggcccgcttcttccgcgcatgggcttaccgtcatctgacgtattcattcggtgccgtacctttgtccaccgaagaaattacaggtatgaactaccgtaacgactgggagcgcaactccgtagaatccatccgtgaagtcatggaacaggactttgctttcgccatgaacaatttaccgttgcgtgaagaaagcaacagcaagatttcaggagccatggcacgccattatctgggtgaactatatctggcaatggaccagccctccaaggcagtcgaagttttgaagccactggcagaaggttccgaatacagtttgataaccaaccgtttcggcaagaactccgccaatccgggctgtccgttcatcgacgtattccgcacaccgatgtatgcggacggaaacacggaggttttatacgcttttgtcaacacggaaccggaaaacagtgctttcggtacagccgaggtttatatgaagagtacgtataagaactattactccaacgacggtgtcatcaacaagagcaacaagtacgatcccgactatacaagcggtgcagccacttggcctcaggtgttctggataaacaacggtggtaaaggtgccggacgttgcgtgccttcaagaggtgctttccgtctctacaactataaagatcagggaactcaggacgaccgtgtatccgattatgcagtggtatggactattaacgagaagggtgccgacggcaagattacggaattccttaacaacggtaagatggtggtagacaccactgtaaccgccgctatgctggatgataataagacaaccatcaagaagtataactggcccactacccgcaaatgggattacgtggcaccgttgctggcaaatggtgacaaggatggatgttatcaggatattgtttatctccgcctcgccgacacgtacttgctttatgcggaagccttgctgaaaaacaaccaggcaggtgaagccatcaaatggattaacaaggtacgcaatcgttccaatgccgtcagcatcacagaagctgaactcaccgcaggaggcgtagatttcattctggacgaacgtagccgtgaacttctttccgaagaagaacgccgccacaccctgattcgcgtaagtcaggagaaaggtggagatgaacgtgatgtgaacaattacttcaaacgccgtatgcgacagttgaatgagattgcaggacgcgaggcacgaggcatgaattcgtatgatacacctgtgttgttcccgattccacaagagttcatagattccaatacaggtcgccagttggagaataatccggggtacttataagacagtagaacaatgattaaatagtgctatcccaattctcctcctcttgggaggaggagtacccgaagggggaggtggtaggtgagaaaagaattccttattgatatgattcataggtattttatgaccttacctaccaccccgccctaaagggcacccctcctccgtcggaggaggggaattgagatacttcaaaaacaaacaatttataacccagaaccaaccagattatgtcagtcgtagccttcctcctctgtatattggtgaccaccgtcaccgctatttacctctaccggaaactgaacccgcaaggagttttgatgctggccggacttgtgatgttgacattcgccctcattctcaatgtccaacccatcattccggataaatccaccggcagcgttgttttcgatttggtgaaagtggtggaagaaacattcatcggcaacctgtcccgcgcaggactgatgattatgaccatcggcggctatgtagcctttatgaatcacataaaagccaccaatgccctggtgcacatctccatgaaaccgttgggtttctttcgccgttatccctacctggcagctaccgtcaccattcccatcggccagttgctctttatcactaccccctcggcagccggattaggactcttgcttgtcgcctccgtttaccccgtcctcatcggattgggagtaagccgcctcaccgcattatccgtcattgccgccgcaacgctgtttgaccagggtcccggctcggcaaacacagcccttgccgccgaacttatcgaccagaccaacgtagcttatttcattacccaccaactcccattggttatccctaccaccttggtagtcatgaccctgttttacttcaacaataggtatttcgataaaaaagaagccgccaggcagagtgcggaaaatagcgaaacagcagaagtcccgcagacctctgccaaaccggatattccattgatattcgccatgcttcccatacttccgcttgcgcttctcattgtattttcgccctatgtgggcctgttccagcctcccataacgctcaatacaacgaccgccatgctattttccctctttgtctcactcgtattcgtaggttgccacacacgcaatatacggaaaacctttgacgccttctccagcttctggaaaggaatgggaaatgtcttcggaagtgtcgtgacactgattgttgcctccgagatattctccaaaggactgattagcctcggcttcatcgactcactggtagattactccacgcatataggactttccggcattgccatcgcagcagtcttcgccctgataatcttctgtgcggccatgctgatgggaagcggaaacgcggctttcttctcgttcggcccgttgctgcccggaattgccggacagttgggtatgcctgcctattctctcgtgcttcccttgcagttatccgccagcatggggcgtgccgcatctcccatagcgggaatcattgtcgccattgccggtgtggcgggtgtatcgcccattgaactggcaaagagaaacaccctgccccttataggcagcatcctgttcctgatagcttatcatttcataacactataaaacaactccgaatcatgttcacactcattaaaaatgcaaacttatactctccggagcatctcggcatgaacgacgttctactggcagatgacaaaatagccctcatagaccggaagatagaattgaccggtattccgttgaataccataaacgccggcgggtgtgccgtcacccccggctttattgaccagcacgtccacatcaccggtggcggcggacaaaccggctatgcttccttagtccccgacgtctccatgagcgaactggtagcttgtggaaccaccaccgtggtagggctactcggcacggacggtttcgtaaaagaactaaccaccctttacgccaaaaccaaagccctggaagacgatggcctcagtgcctacatgcttaccagtttctacggattgcctcccaaaacactgatgtcctgcgtagccgacgatctcatcttcatcgacaaagtgatcggttgcaaactcgccatgagtgacgaccgcagcgctttccccaccgaactggagatactgcgcctcatcaaccaggtacgcctcggcggtttcacttccggcaaaggaggtattctgcatattcatctgggagccttgcccgacggtatcgccccgttgctggatatcacccgcaagtatcccacgctgatttcctacctctcgcccacccacctgatacgcacggaagccttattccggcaagccgtagaatttgcctgcatgggtggtatggtagatttctccaccggaggaaccaaattcgacgctccccaccgctgcgtcatgaaagccctcgaagcccacgtgcccctcgaccgcatcaccttctccagtgacggccgtggcggagtgcgccgcaccaatcctgaaacaggagaaacgacctatcgacccgctcccttacacctcaacttgcaggagatgacattgctcgtaaaagaaggacttctgcctctggaacaggcactgacccttatcaccagcaatccggcacgcaacctcaaactgcgcaccaaaggcagaatagccgccggtttcgatgccgacctttgtttccttgattccgaacttcaactgacgcacgtcatagcacgcggcaaactcgtcctaaaagacaaggaagtcattaaaaaagggaggtatgaagaatgaaaagattaattctacttcttaccattgtctttctggacgccggactccgtgccgcctccgtgcttcccgtaggtgaaggcaagttcacctacaaagactatcccccctttgccgaccgtccggtagatgtgcactactacattccggcttcgggcgatttgcgccgtatgcccattgtttttgtcttcgaaggtgccgaccgaggttacacctatctactcaaagcctggaagcaggaggcagagaagcataaattcatggtcttcattccccacttcgatttggaaaggtttcctttacccgattatcaggaaatcggtgtcatggacgacaaggatcatacgatacgtccggctgaaaagcgaactccggcactggttgataaaatcttcgagtacgtccgccaatcttcaggtagtgaacggaaaggatatatgatttacggtcactcagctggagggcagtttgtgcagcgtttcatgcttttccatgacagcccgtatgtggagaaagccgttatcggcagtccgggatggtacactttccccgatgcttcgcaagtttttccctacggagtacgcaacattccatatgttactcccgaaacaatcaggaagtatcttgccaaaccgattatcctccaactggctacgggagacaccatccgcgaatcatatttaaggaagactcccgaagccgaagcacagggatgcaaccgttacgagcgcggcaatcagttctaccaatatctccaccggatagcagccgaacacaactggccctgcaactggcagaaaatagaagaacaaggcatcggacaccactccaccggaatgggcagacgtgccgttcctgtcatgttgggagactctctccgtgcgctgttcataggtaacagctacacacaatacaaccgtttagtccgacaagtgcaggcccttaccgcctccaccggccacaagctttctgtaaaattagtggaacacggcggctggacattgaagaaacatgccgccaaccctgaaaccctggatgccattcgtgaaggaagctgggatttcgtcatcctgcaagaccaaagtaaagcgcctgcccgtgaaaaggaatgggtacgggagaatgtgtacaagcccgcccattccctcgacagcctgcgccgcctctacaatccgaaaggaaaaaccgtcttctacatgacctggggacacgacatcgacacgtatgccgaaatgcagcaacgactggctgaaagttatttggagatgaccgcacaactgaatgcctggtgtgcccccgtcggcatcgcctggaagcgtgtccgcacggaaaatccaagcatcacgctttacaataacgatcacagccacccttcccgacagggttcttatcttgtcgccaatgtattctgtagcgtattttttcagaaaccctatacaggtacttattatgccggactgcccgaagaggaagcactctatctgcaacgcattgcgcaagaaactgtattcagtaacccttctctctggaatatccaacccacgatgcaaccggaagaggtagcccaccgtttctatcccgaaccggagcagcaatattccactcccaccctcggcaagccgcttgaagaaggtttggcttccttgttcgagataaacaggtatttgaaggatttagccgacaggcatcccgataaggttacgctgtccgatataggaaagactccacagggcagggatatccccgtgctctatttcggaactcccaacgagaaaaagaaaataagagtctggatacaagcaggactgcacggcaacgaacctgccgggccggaagcaacctgtatgcttgtcgattatttactgaatacgtccgaaggtgccgaactgttgaaaaaggtgtctcttgcgcttgtacctgtagccaatacggatggttatgccatgcaaatccgtaaatcgggcagtgggtatgatttgaaccgggatcaaagtaaacttgctgatccggtgactcttcttcttaaaaaagcgtacaaggaatggaaccccgaaatagcgctggacatccacgaattcaatcctttccgcaaggagtttgaattgctgcggggtactaaagcagctacggccgccgatgtccttttcctacccagcggacatttgaacatccctgccggaatacgtacactttccaacggcttattccgtgaagaagcagagaaggcattggaggctaacggttatcattcaggcttttactttacacccagtgtcaggaatgatagtttgtatgcaatgaaagatgctaagagtccacaatctagttccacgtttcagggactcaccaatgcggtatctctattcatagaaatccgtggaataggattgggaagagcgtgttttgcccgtcgtgcagaatgtggttttctggtatcccgcagtcttttagaaacagcggctcttcattcaaaagaagtaagaagtgagatacgaaaagccataaaagagacttacagcggaaagagtgatatatccgtcacttttcaatccgcacggacagagcttcccgttacttttattgaccttgccaagaacgaacgctttacggagcctctgcctactttcgatgcgcttcaactgaaagctgagttagtacgcaaacgtcccaaagcatatattctgccggatacctgccggatgcaagcagagaaattgcgggctttaggaatagaggtagaagagataggaaaacccttcactgccaccgtagagaagtatatggttaccggatacaagaaagctaccaaagaatgggaaaagatttatccggttacagtatctacacggatgataaaagaaaagaagagcttcccggcaggttatttcatcattcgtctttcacagaaaaatgcgaaccttgctgtaacgctgttagaaccggagtccgtgaatagctttgtcaatttcgaggtggttcatacggagttggggaaagaattaccgatatacaggaaaaactaaagagttactgatagacagggaaagctcctgaccccgtattcttttataagaccggaaaaatccggcatacccgctccccgatttccaggaacttttcctatctttgtagtgttgttgcatttatcccgacaattatgatgtatatggaagaagttaaacgaataccttacggtgtgtccaactttgtggatgtcattgaacagaaccagtattatgtggacaagacgatgtacctgcctttgttggaggatcagcccagtaacttgttcctcatccgtccccggcgcttcggcaagagtatcttcctaagcatgatgggtgcatactacgacattgcccgaaaggatgatttcgaacgtcttttcggcaacctctggataggtagtcaccccacccgcctgcaaggtacattccagattatgtcgttcgacttctcacgagtaggaggtagcagggaacaattggaagtgaattttcagatttactgcaccggagagctgaacatctttatgaacaaataccatgacttctattccgatcacatccggactcagttcgaagcagctcccacctttgaggccaagttgcaagtgatactgggagaagcccacctacgcaactatcccctctatctcatcgtcgatgagtacgacaacttcactaatgtggtactgaacgagcatggcgaaaacgtttatcacaccctcacccatgccgacggtttttaccgtaatgctttcaaaaagttcaagggcactttcgaccgcatccttatgatgggcgtcagccccgtcacactggacgacctgacaagcggcttcaatattggctggaacattagtaccaaacagcaattcaacaccatgctgggattctctgagacggatgtacgccagatgttccaatattacaaggattgcgaacaactaaagggtgacatcgacgaaatgataactgagataaaaccgtggtatgacaattattgcttctctgaagaaagcctgaaccgtgacccgaagatgttcaactgcgacatggtgctttattatctgagacagaaaatagacttgggatactctcccaagcagatgattgatcccaatacccgcacggactacagcaagatgaagaaactcctcaacctcgaccatctggacggtgaccgtaaaggcgtcatccgccgcatcgcggaagaaggacagattgtagcagacttaaccctctcctttcccgccaaggacctggttaacccggaactgttcaccagcctactgttctactacggtatgcttaccatcatcggtacccgtggcgaccgtcttattctgggcatccctaataataatgtacgtaaacaatactacgattatatgctggagcaatatcagaataaggagcgcatcagcctgaacgacctgaagaacctgtacgataacatggccttcgatggtgactggcgtcctgccatggagaagattgcctacgattacaaagagaattcctccgtacgcagtctaattgaaggcgagcgtaacattcagggcttcttccaagcctatctcagcatcaattcctattatcttactgcgcccgaagtagagttgaaccacggcttttgtgatttgttcctgatgcctgacctacaacgctatcccgaagtggaacacagctacattctggagttaaaatatcttcctgccaaggactatgacgccaaaggcgaagcccagtggaaggatgccgtagcacaaattcaccgctatgccgaaggccctaaggtacagttgatgtgccaaaggacaacgctgcattgcatcgtgatgcagttctccggctgggagttggcacgagtagaagaggtgtgactatgtcgtgaattatttcagtccttccaatgtctcaccaaccacaccaaatcccttgttgtctcttgaatcctccaccacagtactttcagccttggaggtcggtgcattggcaaatacagtctccacaaaccactttccagatcgaggataaaatacactttcccgcggcacatcacataaagaaaatcacctttcacaaaggcactgtacacggaatccaacggtattttgcatccacatttttcttctggaaagtctttacagggaggttccagcttgatgctggcatagtcggagtcgagcgtaaaaccatattttatacttaatgggtagagcacttcccatatctcgtgtttcctctgttctaccatgcagtggatggcctctgttatcatttcatccttcggggtattcatgtcttcttcggattttaaatatttaaaatcgccctcatcccccttatacaaaaagaagtcggacgtatagttcatatttatgtaacgaaaggcactggtatacccacagaactcataaacatgcttgcacgcccgaccctttttggtctgcgtgaaacatctttattgaagttctgtttcttgacttaaataaaattaccagtttttttcgttatcaaaaatagcttcaacacgccgcatttctcttcggctaatgcaaagatagatgaattgcagggaatagccaaaaggaagaatgcttttttatgggatcagaaaaagaataatacattaacagaattcttcccttgtttaaattcgtaataaccactctgcatttgcaacaatatctcaaacttttgagacagaactaataaagccctttccatctaacagctaattttgtacataataaccaagtgaaatcaacccaaaacatcatatcatgaaaaacctcacctatctcggattattatccgttcccttctgccttggacagcatgtgtctgcacaaaccgcagaacaagcaaagtcagcatctcagcaaaagccgaacatcattttcatcctcgccgacgatatgggctatggagatgtctccgcctacaacaaagactcgcatatccaaacccgccacatcgaccagatggccgccaacggcgtaatgttcaccgatgctcattcttgttcagccgtcagcacccccacccgctacggcatcctcacaggacgctacaactggcgttccagcctcaaaagcggtgtactctacggctactcccgccctatcatccccaccacccgcagcaccatggcatccatgctgaaagcaaacggatataccaccgcctgcatcggcaaatggcatttaggctggaactggggcacgaaaccgggacatgagaaacccgacgccaacgccctcaacgacgaagacgtggactactctaaacccatcaccaacggtcctgccgacttaggcttcgactacttctacggcttctgcggctccctcgacatggccccctatgtatatatagaaaaccgccagcccaccaccacgcaaataggcaccgtacccgcaggaaagaaaccgggcttctggcgtgcaggcgccataggcaacgacttcaaccaccaggactgtctgcccaacctgacccaccgcgcagtagactatatcaaccgccacgcacaagacgaacgccccttcttcctctatctgcccctgcccgccccgcatacccccatcctgcccgccgaagccttcaaaggaaaaaccggactgggtgattacggcgacttcgtcctgatggtggacgatgtagtgggacaagtgcgcgaagccctgcgacgcaacggtatagattccaataccatcgtagttttcaccaccgacaacggttgctctcccgccggaggtatccccgaaatggcagctaaagggcatcatgccaactacatctggcgaggcatgaaagccgatctcttcgacggcggtcaccgcgtacccaccatcgtggaatgggtcaacggtgcaggtcgaggcacctgtgtgcaaaccgtctgcctcaacgacttctacgcctcttttgccgccctcaaccattataccctgaaagataacgaagcggaagacagctacaacattcttcccctcatccggaatccgcaccacatgccaaccatccgtgaaaccaccgtgcaccactccatccgcggagagtttgccatccgtaaaggagactggaaactgttgtgttcccccagttccggcggttggagttaccccaaaccgggtgtggacaaggaagccattgcccagctccccccgatacaactctataatatgaaagacgatcccaccgaaagcaaaaatgtctatcaggaacatcccgaaatagtcagcgagctgaaagacctgttgcaaaagtacatccgcgaaggccggagcactccgggaaaagtacagtccaacgatgccgtgaacaaatgggagcaaatcaagggaatcatgcacgacgattgattgatttccggcagaaaaagacaaccggaagtactcgtctgaaagctaattttgaagaagaaataaaaaaaatatcattttttgcttgcatataagagaaaagtattacttttgccacgaaattaaaaacaaaaagaaaacgaaagtatgaatttgtttacttatacatattacttctttttttacttttactttagccagaaagtagagcgggagtttgtatgtgtcaagtgacagtgatgcttaagaactgaatagagaactaaagtaatatacttaatcccgctccattgtatggaagcgggattttttattttaaagaaacagtatgaaaagaatagccattcaaggaacattagggtcgtatcacgacattgccgcacacaagtacttcgaaggagaagaaatagagttaatctgttgcgctacttttgaggacgtgtttgcagccgtgaagaaggacagcaagaccataggaatgttggcaatagagaataccattgcaggtagcctgttgcacaacaacgagttgctgcggcagagcggaacacaaatcataggcgaatacaaactacgcatttcacacagctttgtctgcctgcccgatgaggactggaacgatctgacggaagtcaactcccaccccatcgcactgatgcaatgccgcgagttccttgcccagcacccgaaaatgaaagtagtggaagcggaagacaccgccctcagcgccgaaatcatcaagcgggaaaatctgaaaggacacgccgccatctgttccaaggccgctgccgagcgttacggcatgaaggtgttgcaggaaggcatcgaaacaaacaagcacaacttcacccgttttctggtagttgccgatccctggcaagtagacgaaatacgccgccatccacacccggaaaccaacaaggcaagcatggtattcacactgccccacacggaagggagcctctcgcaagtactgtccattctttcgttctacagcatcaacctgaccaagatacagtcactgcccatcatcgggcgggaatgggaataccaattttacgtagacgttgttttcgacaacctactgagatataaacaatccatcgcggccatcacaccgctaaccaaagaacttaaaatattaggcgaatatgcagacggaaaatcaaacatctaagatcaagcccgccgaccggttggccagcgtgagcgaatactacttctccaagaagttgaaagaggtggcacaaatgaatgccgaaggaaaagacgtaatcagcctcggaatcggcagccccgacatgcctccctcggaagcaaccatacaaaccctgtgccgcgaagcacaaaatcctgacggacacggttatatgccttatgtcggtatccccgaacttcgccgcagctttgccgcctggtataagaaatggtacggcgtggagctgaatcctaatactgagatacagccgctcatcggctcgaaagaaggtatcctgcacgtcacactggccttcgtcaatccgggcgaacaggtattggttcccaatccgggctaccccacttatacctcattgagcaagatacttggcgcggaagtcatcaactacaacctgaaagaggaaaacggctggatgcccgacttcgacgaactggaaaagatggacatgagccgcgtaaagctgatgtggaccaactatccgaacatgccgaccggagctaacgccaccccggaactttatgcaaagctggtggactttgcacgccgcaaggacatcgtgattgtaaacgataacccgtacagcttcatcctgaacgaccaccccctcagcatcctcagtgtgccgggcgccaaagagtgttgcatcgagttcaactccatgagcaagagccacaatatgccgggttggcgtatcggtatgctggcaagcaacgccgactttgtgcaatggatcctgaaagtgaagagcaacatcgacagcggtatgttccgcgccatgcaactggcagccgccaacgctctggaagccgaacaggaatggtacgacggaaacaacaagaactaccgcaaccgccgccatctggcaggggaaatcatgcatgcactgggatgtacatacgatgaaaaacaggtaggtatgttcctctggggaaaaattcccgatagctgtgccgacgtggaagaactgactgaaaaggtgttgcataacgcacgcgtgttcatcacaccgggatttatcttcggaagtaacggaaaacggtatatccgcatctcgctttgctgcaaagaccataaattggaagaggcattgaagcgcatcagggagatgaagtaatatatttacaaaaaagaagtcctgtaacacaagccactcaccgttttaaaaaacgtgcccgacgtttttaaagaataagggcaacgtttttaaaaaacgaggcctgtatttattaacacgttcgaaaggctttatcgacggggggtgcagagggttcagaagacactgagaaatatctatacaataaaaatataattgaacaaaaataaaagaatatggaacttgaattagaatcgattttgctgccgggtattgaggacaaacgtcctatggtaattgcaggtccttgcagcgccgagacagaagaacaagtaatgtgcaccgccaagcaactggccgaaaagggaatgaagatattccgtgccggaatctggaaaccgcgtaccaaaccgggtggtttcgaaggtgtaggcgtagacggtctggcatggctgaaagaggtgaagaaagaaaccggaatgtacgtttctaccgaagtagccacctcaaagcatgtatacgagtgtctgaaagcaggtatcgatatcctttggattggcgcacgcaccactgccaatccgtttgccatgcaggaaattgccgatgcactgaagggtgtggatattcctgtgtttgtgaagaacccggtaaacccggatctggaactctggatcggtgccctggaacgtatcaacaatgccggtctgaaacgtctggcagccatccaccgcggtttcagcagttacgataagaagttgtaccgcaatctgccgcaatggcatatccccatcgagttgcgtcgtcgcatcccgaacctgccgatcatctgcgatcccagccacatcggtggtaagcgcgaactcatcgcaccgctttgccagcaggctatggacctcggtttcaacggtctgattatcgaaagccactgcaaccccgactgtgcatggagtgatgcttcgcagcaagtgactccggacgtactggattacatcctgaatctactcgtcatccgtaaagagacacagaccacggaaaacctcagcgaactgcgcaagcagattgacgagtgcgacaacaacctgatgcaggaacttgccaaacgtatgcgtgtggcacgtgaaatcggtacgttcaagaaagaacacgatatgacgattctgcaaacgggacgttacaatgaaattctggacaaacgcggttctcaaggtgtacttctgggcgtggattcggaatttatcaagaaggtattcgagctgatacacgaggagagtgtgaggcaacaaatggaaattataaacaagtgattagcgactggtgataagtgattaatggctacgctatctttcacttatcactaatcattaatacctaaacactaaatttatgcgtattttaatactcggagccggcaagatgggctctttctttacagatattctaagtttccaacatgaaacggcagtgttcgacgtgaatccgcaccagttgcgttttgtctataacacgtatcgtttcaccacgttggaagagataaaggacttcgaaccggagttggtaatcaatgccgctacggtgagatatacgctggatgcattccgcaaggtgttgcctgtgctgcccaaggattgtatcatcagtgatatcgcctcggtgaagacgggattgaagaaattctatgaggaaagtggcttccgttatgtatcgtcgcatccgatgtttggccctacgtttgccagcctcagcaatctgagcagcgagaatgctatcatcatcagtgaaggtgaccacctgggaaaaattttcttcaaggacctttaccagacgctccgcctcaatatcttcgaatatactttcgacgagcatgatgagacggtagcttattctctgtctattccttttgtctctacgtttgtttttgcagcggtgatgaagcatcaggaggctccaggtactacattcaagaagcatatggctattgccaagggtttgctgagtgaggatgattacttgcttcaggaaattctctttaatccgcgcactccctcgcaagtggaaaatattcgtctggagctgaagaatttgctggaaattatcagtacgaaggatgcggaagggatgaagcagtatctgacgaagattagggagaagataaaatagatcagaattccatcagcaattaatgagttctttggctcgtttccgctattgtttttatctggggatagtttgtccccagataaaaataataatattcctccccagtattccttcctttcacactacataagaaatccaagagttgcgattcgctatcattttagtatctttgcattcgcaaaaacaattatccaatgatagaccaacctaccatagacagaattctggatgccgcacagattgtagacattgtatcggacttcgttacgttgcgcaagcgaggtgtgaattatgtaggcttgtgtccgttccatgatgacaaaacgccatctttctacgtgtcgccttccaaagggttgtgcaaatgcttttcctgcggtaagggtggcaatgcggtgcacttcattatggagcacgagcagatgagttaccccgaagctctgaaatatctggcaaagaaatacggtatcgaaatcaaggagcgcgaactgtccagcgaagagaagctgatgcagagcgaacgtgaaagtctgttcatcgtgaataactttgcacgtgattacttccaaaatatacttaaaaaccatgtggacggacgtagcattggtatggcatatttccgcaaccgtggtttccgagatgatatcatcgaaaagttccagttaggctattgcaccgaaagtcacgatgccatggcccaagaagccatcaagaagggattcaagaaagaatatcttgtcaagacagggctttgctacgaaacggacgatcaccgcttgcgtgaccgcttttggggacgtgttatttttccggtgcacacactttccggtaaggttgtcgctttcggcgggcgcgtgcttagcagtgcgacgaagggagtcaaggttaaatatgtcaattctcccgaatcggaaatctatcataagagtagtgaactgtatggcatttattttgccaaacaggctattgtaaaacaagaccgttgcttcctggtggaaggatacacggacgttatttccatgcaccagtcaggtgtagagaatgtggtagcttcttcgggtacggcactgactccgggacaaattaagctcattcaccgcttcaccaataacattacggtactctatgacggtgacgtggcaggtatcaaggcttctctccgtggtatcgacatgctgctggaagaaggaatgaatatcaaggtttgcctgcttcccgacggggaagacccggactccttcgcccgcaagcacaacgctacggaattccagaaattcatacaagataatgaaactgactttatacgtttcaaaaccaatcttctactggaagatgcaggaaaagatcctatcaagcgtgctgaattaatcggtaatcttgtacaaagtatatctattattcctgaagcaattgtccgtgatgtatatattaaagaatgtagccagctgcttcgtatagaagacaaactattggtttcggaagttgccaaacgacgcgaaacgcaggcggagaagcaggcggaacaaagaaaccgggaaacaagaaaaaataatgcagcccgcgacgctgcacaagcaccgcttcccgacggaatgcaaccaccctaccctgaagacatgcctccttatcccatggatggagaaatgcctgacggtggtgcaccgcttccaccggaagctgccgaatacgtatcttatatcccgcaggaaggaaaagaaggacaggaattctacaaatacgagcgccttatcctgcaaatggtagtacgctacggagagaaagtattatgcaacgttcccgatgaggaagggaaagaaattcccattacggtaacggaatacatagtcaatgacttaaaggaggatgaactggctttccacaacccgctgcacaggcaaatgttgacagaagcggcagagcatatacataatgaaggattcaccgcagaacggtatttcctggcacatcccgaccctattatcagtaagctaagtacagagttgattgccgatcgctaccaactgagtaagtatcactccaaagcccaaaggttggtgaccgatgaggaacgcctattcgaattggtgcctacgctcatgattaatttcaagttcgccatcatcagtgaagaaatgaaacacatgatgtatgccttgcaagaccctgccgtagccaatgatgaagaacaatgcacctctatcatgaaacgctactcagaactgcgtgagatcaaaagtattatggccaaacggttgggagacagagtcgtactcggttaaatcaccttactcttaatgagaacgataatttcctttcatgaaataacgtacgggactgttatgtaaatgaattctggcgaatgaggttcataaactcttcacgagtctttgcctgattgaaagcacctgtaaaatcggaagtggtcgttatggaattttgcttttcaaccccacgcatctgcatacacatgtgcttggcctccacaaccaccattacacccagagggttcagtgtttcctggatgcattctttaatctggagcgtcatgcgttcctgcacctgaaggcgatgagaaaagatgtccactacacgggcaatcttgctcagccctgtaatgtaaccgttggggatataagccacgtgtgcttttccgtagaacggaagcatgtggtgttcgcaaagtgagaagaaatcaatgtctttcacaatcaccatctggctgtattcttccttgaacttggcagagcggagcacttcatgcgggtccatgaaatagccttttgtcaaactcagcatagcctttgctacacgttcgggggttttcagtagtccttcgcgttcggcatcttcgcccaataaagttataatacgctgatagtgttctttcagttcatccagtgcaggagatacgatttcttcttttcctaacatgagtaagtttttataaggggatgtttatctgctctttcacaatagaaacttctttgaatacgcctgtagcacgcaactggcgcatcatggcatctgcttcttcaatactgcggaagtctcctacacggcacagccagcggggagagttgaaagaggtataaacagaaagttccgggaaatattctttgattcgtgagcccacagcgtgagcttcgttcttggctctactggtattgtttccggcatacacctgtacacggaaaccctgacttttaagcactctgttctccgttccgttggggatatattcctgacctatcaaggcctcgatgcgggcatcctgatggatggttaccttaccctgtcccggcacattgcgttccaaactcttcacaatgttattctgcgccgaagcaaaagcagcgaaagcaaagcatgcaattaaaagtaaaccaagcttcttcataatgaataatataataatagacggttgataatatgattatagagactgataaccgacaaccggcacttcaccggttatcaattatcagtcttccattatctattaattaaaagcatcaatgatacctttgaagtctgctaccttcagagctgcaccaccgatcaagccaccatcaacgtcaggattagcgaacaattccttagcgttagacggtttagcgctaccaccgtaaaggatagaacagttgtcagcaacttccttaccgtacttgtcagcaactaatgaacggatgaaagcgtggatttcctgagcttggtcgggagtagcggttttacctgtaccgatagcccaaaccggttcgtaagccaatacgatcttagagaaatcttcagcagacagagagaatacagaagccaactgagcggcaactacttcattctgcttgttagcttcgcgctcttccagcacttcaccgatacagaagatcggagtcaggccgttagccaaagccaattttactttttcttccaggatggcaactgtttcgccatagtaagcacgacgctctgagtgacccaggattacatatttagcgcctgtagaagcaaccatagcagctgaaacttcaccagtgtaagcacctgattctttatcagcacagttttcagcacctacgccaatcttagcggggtctaccaacggagtaaccgatgccaggtggataaaaggagtacagatgattacatcacagttaggcttttcgttagccaatacttcattcagttcttttgcaagagcaataccctcctgaagggttttgttcattttccagtttcctgcaacaatgttttttctcattttgttttttatttattaaaagggttaatgtatttttgatttataatttgtggtttatggctgaggaagctcttgcttatcactcatcactccatcgctaatcactttatttttcgctctcttcctttccctgcgcttcacaaccaggatgtccacgccgataaccatcagcaacggaatgataaaccacaaaagaacataaccaatcgtgcgcaaatcactttcttgtttctgctgaccgagttccagtttatccagactatccgtcagcacatattcatccggcaagctgttatcactccacttattcagaatgacaccatcctttatcagcatcagtccgggattggaacggataatagtcttcaaagtgatgtcgtccgtctggcagaaaggatattctgcaccggtcttgtcacgccacaattctatttgttcctccggcgaagaagtcagggcataaaagccgtaaccatgctccacactataatcatagatctcgttaataagatctatatcgctatcgtcagcattttcaatacgatgagctactaacaggaatgtataccccttatctgataaaatgctatcggtcaaatcctctccggtttccagacttacaatagagaagtcgtgaatcggaggctcgtatcctttttccttcaacaccgtacgtgtttcaacaaacgtccatgtgctatccgggtaattatccagtgtaaattcctgcttttttccgtctttctccagaatgaacttgctctcaaacacactgggttttgctccttcgggtatttccataccttctttgatattctttccgatcttgtaaggacggaaatccagaataggcagattgtccaggcaatagaatgaaagcacaaatacgaaaaagaacgtatacatagaaaccatccatgccatctttgccgtaataaagcggatgatttgttttccacctttgaagacagatacggctgcaataaacaataccacattcttgccgaacgtttcccagtttgtcaacacccatgcatcaccgaaacacccacaatcggacaccggattcgctaacgccagatacagtgtcagcggtgtcatcacgatcatcagcaacaatgccagagtcgtagcaaaccgccgccgtataccgaagaacaggaatactcccacggagaattccaacgccgacaatacgatggcaaacagtagctgcaaatatgtaggaaaccacgcggccattccgaaagccgtcagataatcctgaatcttataaaaagagcctaacggatcgactgccttcacaaagccggaaaagatgaataccgccgccaataaaaaacggcaaacattcacccagctcttccagattatatgtttctgcttagtctccaaattcaatcttaatcaaaccgaatacggaataattaatcatgtccatataattagcatccactccttccgaaaccaaagtctgtcctgacaggctttcaatctgtttcgtacggtagattttcatcaatatcagatcagtgtatgaactgacacgcatgctgcgccatgcctcatcgtaatcatgattcttagcaagcatcagatccaatgaagttttagcatatttgtcatacaacgccattgcttcttcattcgtgatatcggctgattccgcatatcccagttccagctgtatcaatccgacaatgccatagttgactatcgcaatgaactcggaacgtattccttcgtccaccaacgtcactcctttggtttcaatactcctgatacgattggctttaatgaatatctggtcagtcacggaagccggacggagaatacgccatgccggaccgtaatcatgtagtttcttggagaacaaatcacgacagatggcaatgacatgctcaaattgttgtttggtatctttcatttccttacaaattggttgcaaaggtaggaataattaaagaaaaaagaaaagagggcactctaaattatattaaagtgccctcttctttatgggtttattgatatcttacgaacaacgtaatacctgtcccggacgtaagattgttttccgtgtaatgcgattcaactgacagagcttgtcaatagatactccctgacgggatgcaatcttagacaatgtatcaccactcttcactttatagaacaaaccttcaccggaagccatgctgcgagcagttccttttgaagtcttggtcttagtgaaagtataatgatcagcaacaacgtcttgcttttcaaagtcgaacattaaagcggggtcgataggaattcccaggaaacgggtttcaaagtgaagatgtgaaccggtagaacgtccggtattgccacctaaagcgataggttctccggctttaaccaattgattaatttccacgatctgtttggacaagtgtccgtaaacagtttccagtccattgtcatgacgaataacgatatacttaccatagccacggcgtccctgattctttactacgcgtactttaccatcgaaagcagctcgaatcgtatcaccgatgaatactttaacatccaagccatagtgcatcctgcgtcttctgggacgataaccgaatacatcggtaatcttcgtatgcgtggtaggcatacagaaacctgtcaggtccactttatagctttcaggaacgatagcatcgccataagcttgtacatactcattgttccaagtcggatatagacttagacctggataagcagattgttcagcacgtatctgtttctgtaaagccaacgagtcaacgctctttagtttcctgtcgatgggggcttgtcgggcaatcaaatcctgagaaaaagaattcaggctgaccattgccgtcgcagctattaggatcgttttaatgcaattgaaattcattccgtttcgtcattcttttaaaaaattctcccaaaggtagtatttcttctctaaatgaaaaggctgttcttaactattttttcggtaagggactaaaaggtacatattaaatcacctcctaactccctgtatatcggcaagataaggactaacatgttttacaacataaaaatgcaaataaagtgtatgtttaaccgttattcaactaatggaagcccagttaacgttagttttccgaagtgcctttagttggcgccacaggatttcattctccggacgaataccggtaggatcagcatccaccacttcttcagcaacattgcgcacatattgcagcagttgtccatcgcgcgctatatcggcaattttcaggtcgaaggcaataccgctttgctgtgtgccttccaaatcaccgggacctcgtagcttcagatcggcttcagctatttcaaagccgtcatttgtccgtaccataatttccaggcgcttgcgggtttcctcgaccaacttgtatccggtcactaaaatacaataagactgttctgctccacgacctacacgaccacgcaactgatggagctgtgacaaaccgaagcgctctgcattctcaataatcatcacggaagcattcggtacatttacgcctacctcaatcacagtagtcgctaccattatctgtgcttcgcccgaaacaaaaagctgcatctgcgcatccttctcagctgctttcatcttgccatgcactttgcagactttacaatccggaaattcctcacaaatatgaaggtagccttcttccaggttcttcaagtcgattttctcactttccttaatcaaaggatatacaatatatacctgtctgccctctgcaatctgcctgtggacggattggtacaaacttacacggtgcgcatcatatttatgaatggtcacaataggtttacgtcccggcggcagttcatcaatgacggaaacatcgagatcaccgtataatgtcatggccagcgtacgcggaataggggtagctgtcatgactagcacatgggggggctgtgcattcttagtccataaacgtgcgcgttgtgccacaccgaaacggtgttgttcatctatcacgaccagccccagtgaagagaaattcacggtatcctctatcacggcatgcgtaccgatcagtattcgtacatctcctgttaacagaccggtgagaatggcttcccgcttttttcctttcacagaaccggtcagcaattccacacgtatatccattccgtacaacaactcgcggattgtttcaaaatgctggttagccagaatctcggtaggcgccatcatacaagcctggtaaccgttatccaacgctatcagcatactcatcagtgccaccagcgtttttccactgcctacatccccctgcaacagacggttcatttgcttaccgctccccacatcccggcgtatttctttcagtacacgcttctgggcacctgtcagttcgaaaggcagattcttggcatagaaagtattgaatatctctcctaccgtttcaaatacatatccacggtatttccgttgcctgtctttggcatagcggagaatattcaactgtacataaaaaagttcttcaaacttcaagcgatattgcgctttacgaagcaattccggatttgccggaaaatgaatattcatcaaagcttccgtcagcggcatcaaatgatgttctgtcaatatagggagagaaagcgtttcgggcagcggttcgcggagttgctgcactacggcgctcatcatcttctcaattgcatgagaattgagggaactccgcttcattttctccgttgtattataataaggctgcaatcccattgtcgagagcttcagttccgaagcattatcgatatccggatgagcaatgttaatccgtccgttgaagacgctgggtttaccaaatacaatatattcctgatgtaccttatacttaccgacgagaaatttaattccctgaaaccagactaaatccacaatccccgtaccatccgagaaatgggcaatcagacggcgttgcctaccttctccaatcgtctcaaagcccaggatttcacctttcaactggatataaggcatcgtaccgtctatctcatggatataatagatacggctacggtctacatatttataggggaaataatacaataagtcgtgaagggaatagatattcaattccttattgagtactgaggcacgttgcggccctacacccgacaggtattttatgtcacgagaagctaaatcaaacatgaatccaacaaagcagcggctattttcaaatcaaagggagtcgtaattttaatgttttcccgattacctgccgcgaggtatacagatactcccatcgcttccactaccgaagcgtcgtccgtaaagaaagaagtataaggttgttcataggcctgtttcagtaaatcggcatcaaacacctggggagtctgtaccaatttatactcatcccggctgacggtcacgctttcttctcctttaagatggcgtacagtctccaccacatctatcacgggaatcaccgcctttttttcggcagccaattcataacaacgggctatgacttcctgggaaacaaacgggcgtaccccatcatggacaccaaccaatcccggagtagtaacataagccaatccattctttaccgaatggaagcgagtttcacctccgtccgccactgtatgcggcaaagaaaaagaatgctccgcacatagctctgtccaataagactgctggctatgcgggagcactaatattatatgtatctccggattgtaggcataaaaggcttccaaagtacgcatcaaaacaggttttccacctataggcagaaactgtttgggaagttcgcctcccatgcgcaaccctttaccaccggcaactatcagagcatactccatcaattaaaaattaaaaatgaaagttagatgacgcacattgcctctttcagttcctgtaccttctcttttccgagcatcatatctacaaccgtcagagcaaattccatcgcagcacccggtccttttccggtaatgatgttaccgtctctttccaccggagcacctgtacattcagcaccttccaggtattgctcgaagccgggatagcaagttgccttgcggcctttcagcaagccaagcttacccaatatcataggagcggcacaaatggcagcaatcggtttattcttttcagcaaaatccaagaccagtttccgaagttccgggcacttctccaaagtagctgctccgggcattccaccgggtaaaagaactaaatctgcgtcatagaaatcacagttcactacattcttatcgcaaagcaccggtacatcatgtgcacctgttactatctcatcgggagtcaccgttatcatttccacgttcagccctgcacgtctcattacatccacagaggtgaaagcttccacttcttcaaatccgtctgcaaaaaaaacataaactgtacccataattgttctccttattattttagtttaaagtaatatgttatcgttcctgtctggttattcaaaccgcttacagcattgaaacgcgctttcttagcagcatcttcagccgccttccgcaaggcagaatttatggtattggtcttccggtcaatactggtagcaataacatgtcctgccggatttacagtaatagaaaccaccacaatcccttcatcctgcacattatatgccggacgcggcaaaccaccttgtcctatagaacgcccgccgaggtcaaaagttccataacctcccgttccgctcgacgcaccttctggcgcatttccggtgggacttccctggatacctgttccctcagtcgtacctttgcttcccatttgtgctccttttccgaaggcacctgccaccctcttacgggcagcctcttccgcctccctgcgttcccgctcagctttagcttccgccaacttccgggcttcttccgctttctcggcttccgtcttctccggtttttccggcttcttctttacttcttcctttttaggttccgctttgggcttgataacaacggtttcttcatcctcctgggtaagcatctcctgttctaccgtctcctgcactttaggggcaacggtctcaggcatcacatccactttcaccaaagagggatcagcacttccaaatgcattgggcacttcacccagcattaccggcataccgtcttcatcctgctgctccggcaaagcgaagccaaccagtatcaacaggagaatgaacgctacatgtaccagcagcgcacctaccattcctatatatttgcctttcttcttcggatccaccattgccatttactatttaaccatttacaatgtacaatttacccatcgtacatttatttcccttcaggcgggcgtgtagccagcaccatcttgaacttattctcattggcaatattcagcactttcacgatttccctgtaaggcacagcttcatcagcataaagcgccacatacatttccggttctttcgcagcgcacgattgcaggaaaggagtcaattcttccaaagaaatcgcctgctccttatcatttccaaacgccgcataaaaattcagatccttatctataatcactcgcgtcaagggcttagccgacgtctgctgttttccctgcggaagcaacactttaatagcgttcggcgaaacaaccgtagacgtaatcataaaaaagatcagcaacagaaagatgacgtccgtcatggatgccatactgaaattgggcgatattttagctctacgttgtagcacgctttaatttttaatttttaattattagttattaattgattatgcgggttcattcaagagatccatgaatgccatggttttagcctccatcttattcaccacgccgtctaccagagtcacgaggtagttataggcaaacatcgcaataatacccacgatcaaaccacctaccgtagtgatcatagcctcgtagataccgcccgaaagcaatgtgatatcgatgttgttacctgcattggccatttcgtagaaagcacgcaccataccggtcaccgtaccgaggaaaccaatcatcggcgcacctccggagatggttgccataatcgtcaatcctttttccagtttcgctacctcaatgtttcccacattctcaatcgcagcctgcacatcattcaccggacgtcccaaacggctgatacctttctcaatcatacgggcagccggagtatttacgctgcggcaataagctatggcggcttttatttctccatccaggatataatcctttatcttatccatgaacatcgggtcctctttgccggcctttctgatcacatagttgcgttcgaacaagatgtagaaacaaaggatggacagcaatccaagaacgatcataatccaaccacccttgacagccatgctccataagttcatctcttcaggaccagctatcggagttaataccggattggcgcccgcaatagaatcggtcagcgccggagccacttgggctaataacaacattgcattcatcaacgaagacagtttttatattcctgaatggtacgttccaaccccagatacagagcatcgcttatcagcgagtgtccgatagagacttcatccatccatggaatgttttgatataaataattcagattcaccaaactcaggtcatgtccggcattcagacccaaacccagactacgtgccactttggctgcctctacaaaaggcgcaacggcagcttccttattctgcggataagcggtcgcatagggttcggtatagagttccacccggtcggcaccagctttggcagcatactctatcatctccgcatccgccgatacaaatacggaagtacggatgcctgcatcattaaatgtttcgagtacttcggtcagaaattccagattctgcttggtatcccagcctgcattagaagtcagctgagtcggactatccggaaccagagtcacctgatgcggcttcactttcaataccagatcaataaattcgggggcaggatatccttcgatattaaattcagtacgaagcaacgggcgaagatcatacacatccctctggcgtatatgacgttcatcagggcgtggatgtacggtaattccttccgcaccaaagctttcacaatccagtgctactttcaccacattagggacatcccctccacgcgcattacgcagcgtcgcaatcttgtttatgtttacacttaatctagtcataattcggatcatagtttgccgcaaatgtacaaataatagcgatacattggcagcgttctgagaaaaaaacaccatatttgcatttcattaagaaagtacagacgatgaaatttgccatatttggaaatacttaccaagcaaaaaaatcaacacatgcggaaactttattccgcttgttggagcgacgtaatgcccagctttgcatttgcagggagttctataacttcctgacttccgacctgcacatgactatcgcttccgccgaactctttgacggagacgattttacagcagatatggtcatcagtatcgggggcgacggtacgttcctgaaagcagccagccgggtaggcaaaaagaatatccccattctgggtatcaataccggtcgcctcggtttcctggcagacatttctccggaagagatggaagagactttcgatgaaatttataataaccactacaaggtggaagaacgtagcgtgttgcaattacattgtgatgacaaaaaattgatggaatcgccttatgcactcaatgaaattgctgtattgaaacgcgatagttcttcaatgatcagcattcatactgctatcaacggtgcccatctcaccacttatcaggctgacgggttggtggtatccacccctaccggttccacggcttattcactgagtgtcggtggtccggttatcgtgcctcatagcaaaacgattgctatcactccggtggctccgcatagtctgaatgtccgccccatcgttatttgtgatgattgggaaatcactcttgacgtagaaagccgtagccatagttttctggttgctatcgacgggcggagtgaatcctgcaaagaaacaacccgtctgcgaatctcacgggccgattacagcattaaggtaatcaaacgcttcaatcatgttttctttgatacgcttcgcaataaattgatgtggggagcggatgtaagataaaaaagagccgctatccgaacttcaacttctcggataacggcttctcttcgtctatcaactatacttaaaatgtcatagcctgccctccaatcacacctgcgatggcagtagcaacggcaataatcactttaaaaatcaccttccaattcgttttcttcatagcgattcttttgattttcattctcaacttttacttttcagctctccttatccaagtggattctcatccagccctccatcgcccgagttatctcccgatccaccgtccgagccgcctcccgcaggaacgtttgatagacctttcagataatcgtccaaactgaccagatccaacttttcaccggcacgcgtagcagtcttggttatcttcaactctttattggcttgaaagaatatgcgaacgctgtccacgctcttggcagtcacatcttctgccttttcctctcctttcgacttagcagccagcaaaaacacacccaacccggcaatattcactgtcttaccttccaacaactgctctttcaatttctccacaaagttctgcatggtactcttgatatcaccaatagagagtgaagaacgatcctgcatcttctgcgcaataaatgccaaatctacagtctgtcctaaagttattaactgcggaaaatactttttgggagaattttcaacccgagggtcggacggtctctccaccgttctaaaaattacgctcatacttttttcatttagagatttaaattctgttttaattcacttcgctgatcaacgatgatgcaaaggtgaagattaaatctctaataaaagaaagaaaaaaggtagcaaaagcagtttttctaaaaaaagatcacaaacacctatagaacaacatattacacaggcactcctatgtaaacaatctctcttacattattttgcagtaaatataaaaagcggtaggtcatagtttatcgaactatatcccaccgctcatcttcatagccataatactttaacccaactgctgattattattcatcaatatcctaattctttcctgttcactttttgacaagtatattttcgataaggcttgttgataaatacgtaaatcatgaatatcagaacctataaaatcataaagtccatttttcaacataaaaagagctcttttctgcacctcttttccatatattccagccaatgacattaagttcagttgaaatttgcatttctgccttttcaaaccagtcaactcccttagtgtcatatacaaatatcgttcaggatgagctatcaaaggacaataaccactaatagacaattcataaagcatgccacgcatttcaggaggggccgccatgtatgaagtctcaacaagtacaaatttgtctccaatcgttaaaatccccgcctccatctgtcgactaaagccactatccagcatatactcacctgctaaacaaaactcgataccagacaaattatcttgtataaaagccttaaaatgtttctgtaaagtattaggatagttatccggtaaatcttccatgatatgtggcgtcagaaacatcctcttcacacctattttagccaaatattcacaagcgtgatacgactcttccatagaacacatgccgtcatccacccccggtaatacatgggaatgaatgtcggtcatgttttccagcaatcctgaattcaagatgcttttattgagtgaaaaaaatgaaaacattttagcctatccggttacgtaaaaatctgatttgccttcttatacggtgcataatgcctttacgtttatgtttcttctcgttcccataaccatagccataaccgtaaccatagccgtaaccgtaaccatagccgtaaccataacctttccggctataagaaactccattcaatacaacagacatattcttaagtttgctctgtcgatacaaggtttccaactcaggtaattgacgacgatccatcatacctgcacgtaccacataaatagttaggtcagcaacacgattcacgatcgaagcgtctgctacaacgccagccggaacattatctattataatataatcataatgtttcttcagttcttcaatcaaatgatcaaaacgttcactcatcaacaactctgcgggattcgggggcacaggacctgcaaagatgaggtccaatttcctatattcctcactctgaccgattatatccttcacattatttgttttaccggacaaataattagtcaaccccatccgactactcggattagcaaacagaccgctcaacgtacctttccgaatatccacatcaaccagaatgacttttttattcatctgcgcaatactcatagccagattactcgaaacaaaggtctttcctgctcccggattagaggaagtaaacatcaccacctgcaaattttccgatttaacacgcataaaatccatatttgtacggattatgcggaaagcttccgacaccgagtctcgcccgttctcatgtacaacaatttgacgacgctcttcccctttcttgggcttattacgatcttcgggaatatcgcccaataacggtatactcaatgccaattccaaatctttgcggctatgtacttttgtatcaagaatactcaaaattccaaataagcctgcagggagtgcagctccaagaatcatagaagccaaaaggataatcatacttcgcggcgctactggtctactactacccgatgcaggatcaatgatgcgtgcattactttctgttatagcttgcgtcagagcattttcttcacgcttattcaacaaataaagatataattcctctttaattttctgctgacgttctacagtcagcacatatttctgttgggtagggacagcctcaatacgtttggccgtttgtcgctcctgttcacgtaaattcttcaaattgatattaatacccacaatcaaattatccacagaacgaagaatagactgccgcattgcccccaaggaattattcaaatccatgacaaccgggttacggtcactgctaccggtcacaaatttatcacgtttcaataagatttcattatattctgcaatctgtttttcaacaccagcatccgtaattcctgtattggccggaatcagatctgctattttagaaggatccaccaaatactgtttgatgtattctgcaagactcagttgattttcaagactcaacccctcctgtttatatttggtagtagtttgcaaatacatcccggtttccgaggttatatccgtcaactgattttcacgtttatatgattcaatatccgcatcaactgtacccagctctttttcaattattattaaacgctcatttataaaattcgaagtgttaactgctatttgatttttatcattaatagcatcctcattataaacagaaatcagagtattcaaaatatcctcagcacgggctatcgactcatctttatattcaagatcaattattgtagccattttactcgcgagtgaaacggataatgtagtcatacagtcatccacaacacgttctgttacagatttttgcacttgaatcttatctccgtaatattcgtttgtataatataaagtaggagtaactacgatgttacctagcgcagtctttatagtgtctcccaaggctacttcaggttcatctacagattgtatttcttcgttattgacaatcatcagcaactctgacaatcgaacttttttttcagacaagggagttacacacacatgaatatattggttatcttctgcatcaagaaatgccacctttatcggtgactgagtatataattcaatcgtacgtaatccaatccgcaccttataactcatattcaatgaaagacgacgcacaacattctccataatgctacgggactggaaaaccagtaattcattatccacactcctcgctcccccgaaaagattcagatcagcaaaaagagcagactctcccataccgcctcctttcttgtcatcccgtatcaatacggtagctttacggctatatgtcttaggtgtagactttaaatagacaaaagccaatgccatgcatacaaaaatagacgcggcgaaccacttccagttattgcgcaatataagtaataaatccgctatatttatctgctcttcctgtgcggccatattggattgcactttttgctcttcattcatctgttgttcacttttcatatctagtcagcaaatattctaagggttgttatttaaatatagttatcaacaatgaagcaatggatgccaatacagacgctgttgacaaccatacactggcagaattattcgaattcacacggctttgtcccgttcttgccttattcggttccacataaacgatatcattctgctgcaagtaataacagggagaattaaagatatccgatgaacgtaaatcatgataacgtataattcgttctccattctcttcacgaatcacagctacacgatcacgtctaccatgaatagtcagatcgcccgcacgactcaatgcttccaataaagtgatacggtcacccgagatttcaaatgtacccggacgagatacttcaccaattaccgaaactttaaaattcagaaactgtacagtcacaattggatctttaatcaaatctccttccgatagttttttcttgatcaactccgtcaattgcatacgagtcaacccttgtacatgcatcttacctaaaacaggaaaatcaatatctccgttctgatctaccaaataccctacaatcctaggctggttataattactacctatctgatatgataccagcggcatattgaaaggcaaggccaattcctcatccttactattaacaatgatcgctagcaaatcatccttgtgaattttcacttcataacctttctcaattttttcttgctttatcgtagctatatcctgcaagtaaagtacttctttaggtgctgaacaagctgttaaaaaaacgatcaggcatattaatacatacaaatatcttaagttcatctatttatctgtttctgttattacttcttcatacattttttgatctccctcacaatatacgctacatcctcatccgtcacgcaaggaccagcgggaatacatagtcctttgttgaagagtctctcagctgttccatccacataacgggggttatttgcaaatatgggttgcagatgcattggtttccacagaggacgggtttcaattccttttgcatccaaggctatccgtaactcttcataatcaaaacctgttacgtttttatctatcaggatagttgacaaccaataattagcgttaaaacgctcatctggattggattttaattcaattccgtctacatccgcaaaagcctgcttatataactcatgtatacgacgatgatgtgctatatgttcattcagcacagtcatctgaccacgcccaattcctgcacaaatgttactcatccggtagttataaccaatcttttcatgctggtagtacggaaatggttcacgcgcttgtgttgcataaaacatggttttctttttcgcctcttcattagacacgaccaaagctcccccacctgaggtagtaatcattttattaccgttaaagctcaaaactccaaattgtccgaaagtaccgcacttacgccccataaactctgagcccaaagcttctgcagcatcttccaacactggaatatcataccttgctgcaatagcacaaatctcatctatcttcgcaggcataccatacaaatgtacaggaataattgctttcggtttcttgcccgttttagtaattcgatctctaacggcctcttccagtagagtaggactcatattccaagtatcctcttcactatccacaaacacaggcgtcgctccctgataattcaccggattagccgacgcacaaaatgtaaatgactgacaaatcacttcatcaccagcctgaacccccagttgaattaaggccagatgaatggctgctgtcccggcagacaaagcaacaacctccttattctgcccaacaaaatgtttcaattcttcctcaaaggcattgacattaggtcccaaaggtaccacccagttcgtgtcaaaggcttcctttataaaatcttgttctttaccgctcatgtgagccagacaaagataaattcgttgatccatatatttatatgattattttaatgtacaataaatatccccatgtcctggatagagatcacactctttcgccaagtttattatacgctgtttagaaatctccgcatcttccctattgctatgtggaaatgaacttatcactttcaaaccgggaatataagaatcgccggagaaaattcgactacccagtttataagtcaagcaacttttatcatgtccaggagtttcataaacttccaaatattcattaggaaataattctattttatcctcttcacataaagattttatattatctccaactactgttattggatcatcatgataacgagaaaaatttattttatcagaggctaaagcttgtttgccgaaagaagaagtataaaccggacaacctgggagcatctccaatatcttttttataccataaatatgatcataatgagtatgtgtaaggaatattcctttaacagtcactttacttttgattataaattcttttattggcagaatatctcctatatctacaagaaaaacattattgctattttcttcagttaaaatataggtattcgaagtgaaaacgctattaactattttataaataaacatctaattatttccattaaacggctctgttgtagccataccttccatattgattccctcacgaacaaatactttttttatcgtaagaaaaaatatcttcatgtcaagcaaaaatgacatatgatccacgtaccagacatccaattcaaatttctttttccaagaaatgttgttccgaccattcacctgtgcccatcctgtaatgcccggacgcacttcatgccgtcgaaattgttccgaggaatataaagaaagatacttagggagtaaaggacgcggacctattaatgccatatcccctttcaatacatttatcaattgaggtaattcatcaatggaaagagaacggacaatcctgcctattttagtcagacggacatcatccggtagtagtttacctcctgcgtcccgttcatccgtcattgttttaaatttaatagctttgaatatcttggcatttttacccgggcggtcctgagtaaaaaaaacaccagcacccttattggcaaaatgaagaaaaatgattataagaagtagaattggccaaataactactaaagtacataatacaatgataaaatctatcgaacgttttaatccacctttatacataacttacaactctattaatggttgcttattccaatctatcaactcagctgcttgttccacattgcaaaacaaataattttccaataaaacatctaatttattcaatgcccctcccttaccgatattcgttttcatatagcgagttacacgattcttcaatgtaccgggttctttgaaatatttttcgaattcctgtttagtcatgaactttgaattctgttcgattaaatcattgatatgaaaatagaacatcacataatccatacgattaagaagttgcctttgtaaccacaatggcactaacctgaaatagcctccacccgaaaatggcaccacttttcccattaacctggcaggacagataggtaattctttaagcgtataatctccttttctaaccaacgaaggtacagatgaagtaaactgaggaaatcctccaaaatcccgactagcaggaaagacggaacaatcatattcaattccattttctaccagcacttcaaatgcccaatcattatctttccctattgagaaagccggtgcacggaaacttctcacttttttacctatcaaattctctatttcttgtacagcaatgcgtgtatcttctgcaaattccggtttgctcattttgtttatccacaaatgccggtttgaatggcaacccacttcctgaccattatcggagattcgtttcaccacctccggaaactctaccgccaattgccccacacagaaaaatgttgcttggatgttatttttgtcaagtgtattcagaatccaatcaagcaattcatcataccgacgatatttctctttccgtcctccattaagatacttctcaatataccattcttctgtatcaaaagtcagtattttcatagaatcatgaataatatacaaaatctaaatctgaatcagcagatgttatcaacatagaacactctccctcctcaccaggaagggtagtacctccgtatattttcttatttgtacgtaatataatagggaaaaaactcaaaaattgtttttttaaagatgtcaaagtcaaagaaaaaccgatacgattcattttagctattgtagaaacagctttatctatattattcatataatcttttttcttatagcgaaaatcaactaatgaaattatattaaatcctttataatatgccaaacgcactacaaaataacaaataaactccccattcacccaacctttgtaaacaacatatttcctatatatatcaaaaaaacgcttcaaaaaaaatgatttatcacgtattatttcaatatcatcattttgccaaaagccatcaggagtaaaaaacatttgttccaagctatctacccgacaaaactgcacattctttatctttattacagaaggataaaacacatcagtttgttccaacctacgcctcgtaattttttcatacaaactatttaaaaagtaacgattcacaaacaaatacacaaagactatactaacagatctcaaatgaggaataactttgggctgtatatcatatgcaaccttagtaaaaccagtagtacatctttctaaataccttcccatttgttcataaatcatccgtccaattcctttaccacgataaatattagaaacaatagtattaccctcccagtaaaactcctgttcctgaccatatatttttattttattccaatttgctgtagtgcaagctactatcttatctgcatccattactacaaaagttcggttcaacaattctttctttacatcagtagcttgttttaaccaccaattaagataccttttatctctattaggaaagttctcaatcaaaaagagcataagctgttcgtacaaatctgaagtataaaaaactatgtgcattgttatattccagactttgatttacgaaaagaagaagaacatatcttcttaagacctgaaaaaaaagaaaagaacaaagcaccactttcttgataatataaattctttgaaaaaaaaacaaaccaagaaggaatgcatgaaaaacgtttatctgaagataaaaaccacatgatatcaagtcccaaataacgtaattgcttatttggaacataaatgtaagaatccgtcttcaagttcattatatcatctactatcaaagcagggaagttaacgcctgaaatttctgccgcacgaatagatgcaggcacacgtggattgatctctattattttaaaatctccatttttagttcttagaacatcaaaatcagcaaatccaacccaatccaaaatttccaatgttttaatacaaatttcagacaattcttcagattcaatagtcttacaaaaagaactacttccacctttgattggataatacctaacaatttctattattacagtattaataatatccccagcctgatttctatacatcataacattatagtaaggtgcaccagaattatctatatactcctgcaaagtacattcaccatatttatctaatatatcaccatattttccttgtaaatcagataaagaattcaccattgtaatgcctctagcccctacagaaatattaggttttatcaaagctggaaatcccactttatcagctgcttcttgcaagttattaggagttaataattcagttttagggtgaggaagattattttgcgcacatagagataaaagtaaccatttatcatttgctttttgaaagatgccataatcaggaactgcacatttaagacagtatttttgttctaattctttcttatgcaaacttaataattctgccgttgtatcacttagaggaataattacagataccaaatgttgctctaaaatacaatatatagcagacaaataaccctccttatttttaggggtaatatcagtggtataaaacttatttatatatttcgattttgttgaaatatcacctttatataataatgcgataacaacatatcctcttttctttaaagaatgagcaactgacaacgcttgaaggccaccaccaataattaaaatatccatattatatcccaattatatccggcattaccattggtttggtcttcatccacatagttccccatgttaatcctaaaccaaatgaagacattaataatgtggtctctttcgacattaattgtttccgaagtcgcgtcaccatcaaggaaggtatagaagcacctcccaaattaccaaactcttccaaattataagggaccttttcctgaggaagttttagtttcttaacaatacggtcaacaatcatcttgttagcttgatgtattaggaaataatcaatatccgtatcgcgattaattttataatctgtcaaaaatttctctacagatttgggaggacgggatattgcgaatgagaaaacattcatcccatttatcagagtatggataggagcacgaacaataccattaccgaaatcctcgtattcaaaagattccggagtagcctgatgacgaaaaccaccgtgaggagtcatcaatgcttcataaccttttccatacgtgtgaaaatcaacaataatatcattagctgtttcatcatattccaaagcaacagccgtaccacagtcaccaaacaatggtacgcggctcttgtccttcatcgaccccatacgtaatgctgtgtcaccaatcagtaacaaagcacgcttcacattaccagttgtcaacaaattgccagcaaccgttattgcatacatgcaaccacagcatcccatagggatatccatacagaaacagttctccgacaacgccaatctgtcttgcaatatacaagaagtaggcggagtacgataatcacctgttacggattcaaacagcagaacatcaatactatccctctcccatcccagttcttcaagtaacttctcagcggcagcttgacacatatccgaagcacacatattatccggagcaatatgacgttttcttatgccgactgtattatcaaatacttccgcttcttcctgagaaaagaaatcaaaatcagatgtcttcaccacattctcaggaacagccatagacactcccttcatgccgacattcttaattttccatcttgccatagtgcaacccgttagagttcaacatcatattttttcaagatttcacgtcccctaccataggaagtgaattccataatatcttccggatcgaacatcacatcaaaggactcttccaataaagcaatgatattcaactggtgaacagagtcccacgattctacattctctttcgagaaatcatcactcagtacagaactctccacaccaaacacttcaacaaaagcatcattgtatttttcaatattcgtcattacattctctatttttataaattcaacttactatataatatctttccggcttcattcttaggaatactatctattattctcacctcaaaagccgacgccacaagtttggtcttttctaccaatatttcctttaccgcagtcacatatttatcatcagtcagatagacaatcatcttttcatctgtacccacacaagcacattctatcgggcatttacctttaattatctgttcacactcatccaatccgatacgcattccatacagttttaaaaagcgccccatacggcctacaatgtaataacacccgtcttcatcccgataggcaagatcacccgtacgcataaaaccattacgctcatcacccaacagtaaatcctcgcgtttacgagcataccccatcgttacatttttgccgcgataacacatctcaccctccatgtttggcaattctattacagagccatcactgtctatcaatgacaattctgcattcggaaccgcacggcctatactgccacactttgaaatcgcatattccggtggaagataagccatacgggcagtaccctctgactgtccataagtggcaatccaacgtttcccgttatcacgacagtattctgcaaatttcaaattcaactgacgcggcatttttccgcctccttgagtaagcagtgtcaaatcaggtaagtccatacggaaaaagcgcatcagatttaatatctcaaaactataaggaacacctgtaaaactggtggcatgctgttctttcataaaattccagaaagctttgtcggtcatactttgattggttatcaatacagtagctccaacataaagatgactgaataccactgatagccccatagtataatataatggaagaacaagcaaagggcgatcattggaagtcaggccaaagaaagtagagatatttaaggccgccgcttctatattaccatatttatgccgtaccaacttgggactacccgttgagccggaagtaggtaaaagatgagatagatcaggatgcatcgcacaatctcccattcctgtacgcaagaggatatagccataatattcacacaccatttcataatgcagatcaactgccatcaacgagggcacacaaacataagaagggcggtaaatatcaagtagattatgaagaagttccttttcaatatgtgcattcaatattaaagggacattgccggaattgatacaacctatactccaggctatacctccgacattattttctgtcaataagaataataaggaacgactgggaagaatagtagatatgttctcggaaaaatccgacaactcaccatacttcaaggtattccccaaagcatcaactgcagcaaacgcatcctgcgcctgcttatttaaattcaatatcatttggtttattttattctaaatggaagcacagccatcaactcccaatatctgacctgaaatataagaagaacgctctgaagcgagaaaagcacaagcattagcaacatcttcaggagctcccaagcgtcctagagcaatcttttgaatacgagtatcgattttttcaccactctcttcataaagttctgaaaaacgttccgttttgacaatacccggtgcaacagcattcacacgaatccccagagaagccaattctttagctgcagatttagtaaaagccatgattgctcctttggttgcagagtaagcagattgtcccggtgaacctagtactgccgttaccgatgctatgtttacaatagaaccgctatgattgcgagccatcaaacgagaaaccagctgaatcatttcaattacagctattacattcacacggaacatcagttctgtttccggacgcaatatcataccgattttcttattaaataccacacccgcattgttaaccagtgcatcaatacggccttcttgtttgaatacggacataaaggctgattttacagctgtagcatccgtcacatcaaaatacaaaggaagcacacgggtattattatcttccgaacaagccttcgcccattcatccataactccttcagcacgatcacaagcataaactattgcaccatcagaagcaaaacgttcagctatagatttaccgataccttgcgcggcaccggtaataatacaaactttttgtttcaataatgagttttgcatatacataattaactaagtgtcattccaccgtctattttcaacgcagtaccagtcacccaagaagaagcatccgacaacaaatagacaacagcataagcaatatccgatggagtaccgtacctcctcaatggatagtttttcaattccgcttgacgctgctcctctgtaaactgtccattattaataagtttcgtttcaactacaccaggattaacactattagctctaattcctttcggacctaattccaaagcaactgttctcataaaggcgtcaataccgcatttggtcgttgcatatattccatttgcaatagacacacgaaatactccagcagcagaagctaaaaaaacaagtgaagttcctttttttacttttttctttttaaccaagtatttcgtcaataacatcggagcaattaagtttatcttatgcacacgctctatctcttctaaagttagaaactgcgttagcgttaatttcatcacccctgcgttacaaactaatccgtccaagacagggagaatatcaactaattgtataatttcagtttcatttgtaagatctgctttatagtatgcatgtgactgtccttgagaataatccaaaagattatgcgtctcttgcagcccattctcatttatatcagtcaaaacaagacttgctcccattttagaacaatcaatggctgtttgtcgtccaatgccaccagcagctcccgtgacaagaaccactttattatcaagcgtatatggattatagcacattcaatttttaattttcccaattatagtgaacaagtcttcgattgtagtagcgtcacggatatcctctcctttcagagtaacatcatactcttcgtcaatcatggcaataagagtcaatgctattagagaagaccattcatcgagttctttaaaaactgtttttggactaaaacagccaatatctgtctcgtcaaattgttcagcaaacttttcaacaaaatattgtatatccattatcatattatttagtttgtattaaaccatacaattcttctatcgtagatacagagcgcaaatcagctccagtcaaaaacttatcaaattcttcatcaatcattgaaataatagaaagagcagtcaatgacccccactcatccaattctttataaactgtactaggagtaaatttctctacgggagtttcatcaaactcagaagcaaattttgctacaaattcatttaaagtaatcatattcaaatattatttaatgggttatattgtttatatataggtattgaccaaattgtagttatttttttttcaggatacatgcgagttactattttttgcaaagtatcatctggaccaacttcataaaacttatccactccactactcaccatattgtgaaccatgtgagtccataagacgggatgagttatatgctcaataagattattcttaattttttccggatctaaatttaattccccatcaacacattgacaaacaggaattactggcgaattgaaaattgtctcatcaatatgcttttttagttctaaacgagcttcttccatatatggcgtatgaaaactgccaccaatcattaatggtacagcttttttcgccccttctttcatgaatgctttacaagcttgtcttattccttttttagagcctgaaataacaacttgaccgggtccattgtaatttgcaaaataaacgggttcccccgtctcatcccaaatttcttttattcttctcgctacgtattcatcagaaaggcctattaccgcccccatagcagtattagtattctcacatgttttctgagctattaatgccctatgtaacaccaaattcaatccatcctcaaaactaatagtaccgttcactactaaagctgcaaattcacctaaagaatgcccagctacaacatctggtgatatatgatcttgagataaagccaaagcaacttcatacaaaaaaactgcaggctgcgtattttgggtttccattaactgttgctctgttccataaaacataacatcagtaattcttcttcctaaaaagtcattagccaactcaaaaatttcttttgccttgggaaaattatcatataattcttttcccattccttctttttggcaaccttgaccgggaaaaataaaagcattcataattatatttatcttaagtcttgattaatgggtctataaatgttggtttttgataaatcgcatgcaatactcccccacgataagccaacgccgtaagctgccaacactacttttttccatcttgtagtatcaacctctagacctttgtgtgcataatccgttataaccaaaggtacagtcgtaggtcctgtatttccataattttcaatatcgaaaggagctttatcttcattgagtttaagcttctttttcataaaatctaaagtaaactttgtggcttgatgcaaagcataaagatcaacttcatctttgtcccattccataaaatctaaaatagttttaatactcttcgtaccacatgatacaataaaagcaaaaacatcatcgcccttatttgcatttttactaaaatccaatttctgagcattatcaggccaatggcgaaaccctccattcacattaataactgtatttgctcctgaaccatccgagcacaaatgaaatcccatagaagaagtacctacagaaaccaaagttgcagatccgcaatcaccaaaaaccattctggccccaaggttatcgggattcaatatcttcgtatttgtatctccagccatcaacaatacatttttacatgcaccggtatgaatcatagaagcagcttgaaaaagtccatacatatagccggaacatccataagaaatatcaaagcaaatagtttccttagacaatcccaagcggtgttgcaagactacagaggtagctggatataaataatcaaatgtttgagaaacaaacacaacgccatctatttcatccttattaatgtcttcacttttcagtaaaagttctgcagcttcaaaacataaatcagaagttgtctgacattgttctgctacatgaaccctgacaactcctgttgtcttcatcatgttatctatttctttatcctcatatttcccttttaaactattcatctcaaaagtattttgaggaaggcatgttgcaatagccttaatttctacattctttattaaacacttcattattttaattatattattaataattagctaatagactgaccaccatctataattaattcagttcctgttatccatttcgcagcatctgacaacaaatatatacatccataggctatatcatctggtactccaaaacccaatggtatagaagcggcctgtttggccatttcctcctcagaaaagttacttaccggtttggtacggatgattcccggatgaatacaattcactcgtattcttttaacgccacattccaaagccatcactttcgcaaatgaatttaatgctcctttagaagctgaatacaaagaattacctttataaggctttattgaagccacagaagaaataaaaataaccgaagcccctttctttattttattatgtcgaaataaatattgaagtaatgtaatattagaaaaagtatttgttttaaaaacctcctcaacactattgcgtgaattaaatttaattggagcagtttttaccatacctgcacacaaaacaattccatcaagttgtggaagagaagaaacaagatcagatatccctacttcatcagataaatcagaaatatatttctgccttttttcttggtttaggttttgatacactgcatttaatctttcctcatttcggccagtaattattgtgaagctaccagcttccgagcaacgcaatgcaatctgtttccctataccggaagaagaaccggtaactaatacaattttctcttctaatgaataaacaagactcatatacttttattatttaatatcaatttttcgcgcaggatttccatataccgttattgcattctttatattacgtataacaaagctacctgctcctacacatgccccactagctacctttatattatggttaatcacggcagcagtatgaatacaaacagcatctcccaattctactcctgcaatacaaactgcatggcaatcaatcctacaccaatttccaacttttacatcatgaccaataatagccccattttggataaaagaaaaatcaccgatagtagaatcaactccaatgtacgcattagcagcaataatacatcccattccaattctgacattctgagaaatgcctgcacatggatgcaccaatgtcataaattcccctcccttatcttgaatagtcttgatacatttcctctttatttgtacatcaccaattgagattgcaaaaacatcttgaggttgtatttcataagactctatagaacctattattggaggataaccttcaaaatcatccaaggcgcttggattatcatccaaaaagcccttaatgataaatccacggccatacccttcacaacaggaagccaaaaaatataattgacgccccatacctcctgctcctaatattatcaaatctttcataaattcaaattttacttattcctcaaaaaaagatggcataaatcgatcataataaatgcgatttctaacactacaatctctattatacgcttgctcctctaaagacaaaggttttaaatcatctattgaattcaaatctttttcaaacgaaaaaataatataccccttttcccgataatattgtagaagattattcttttcacgcaaaaagactttcactccattctttaacaaagtggatatattaccagaagcttcttgccgtttctgtccaaaaacagcaacttcaaccgaagacattagttcaaagtatttatcacgaggcatatattctaatataggattaaattgttctttaaacaagtgctgaccttgccgtaaaacaagctttcttatgcgggaactaccataagaaagaggaacaatcttcttataatcatttttagtatctaaccaagctattttcttcatcaccgtgttatgatttccggtattagaagcctgatgattaatcataagtgttttacttttcttacaaacaacatcttctatatttacttttatcgcagtttcctctgaagccatatacgcaaagtatttatactttatatttgtatgaaaatgggcttgtaataattcataatctttgtaattccaaaaacagaaataatcgatcatagttaaggcttccttaaaaacgtcagacaataaccgctttccataaaaaaaacgtttaacaatgaaacttagtctattgggagaataataagtatctctaagaaaaggattcaagaaaccatcaaacaatttatatttacctaaattacctaaagtaaaataaagttcatatccccaaaagatccaataaaccctacaatcaatgttctgttttaaaaatttcaggcaatcaactaaatcagatttcaaaccatgcaatattattttatcaatattattttctgaacacagttgtaaaatcaatggaaaatttttcttcacaaatggaactcctaataaacgcctgtctgattgaagcatttcaaactgatccttttctttattgacaagaaacaaattttgacctggataatatttttcaaaaacttccaagcatttatttataaaattcccatcaaaacatagatgcaaagcactcatagtatcatcatttaaattcaacctttctttggtataacacaggaatagctaataaatagataaataaaaaatattcgcgtaaagggtaatctcgtatcatatttgctaccaaaaaaagtattaaaaatgcccctgcttttgaagaaggatattttctccaataagaaaacaagaataacaataatagaaaacagccaactacaccacgcagaaaataaaaacgtttccaacccgcacaaccattcagtatattagtcgtagaagtcccttttgcatcaaaagcatcccgccccactccaaaccatatatctgaactaacaacataacgatcaaatcgagtttgaaaaaaatcagtagtacgattagcccccatcatttcaccatcttcaaagattaaacgctcaaaaatacgtttgttcaaatagttttcacctgaattataatttatagatattatccatacaacagcgataaacaaagagaaaactgtcacgtatatcattcccctttttgtattataaaaaatataaagagccactccaccgatcaacaatccataagcagccagggataaagaaaagagcactcctaacaacaaaataatatttcctttttttctcagattaaacccttctacgtatagcaaaagacagcaaatagtaccaagatgcccaggttccaaaaacattccagcaaaacgaggcattatttgtaactctggaataccatttaatataaataaataatagactgtatgtatatagtaagcatccgtctccgaataataatgtggtaatggtacatttgaaagatataataaccaacctactaatgatatagcaactaatatttgagttgctttaaccacataacgcaacaatcttacttgggtcgaataatctgataatataagaaatacagagcaccataaagatgtaaatattgtaaataaggacaatatattaaattctgatatagtcaatatttcatatagaaaaacaagagttatagaaaaacacaaaaagacttgatataaagtcgttttatcatatatctttttatagtaatgtatatagtatagtaaactagagcctccacctaaaattgcaattaataccatagaaatatcccaagtgaaatacagcctaaatgatttaaacatcataagcaaaaaactcactcctagaaagaagtttaaaactgaacttgtggttattcttaaagaaaaaaagtttcgcatttcacttctccactatcaaattgttatacaagcatttgataagacttttatgaagatcatgatacccatcaacaaatttcgataaacatccattagtaattatgacaaagccatactttttctgagaatggaaaatcattgcactatataatccataagctccacctgtttgaccatataatgtttcatgtggtataagatttttatattctctaaaagaaagagcatacgaagattctggagttaatacatttctcatttgcttctcactctttcttgttataatcctcttatgattaaatatcccatcttgcatatgcataatcatatacttagctaaatctcctgttgcaatcttcattcctcctgctggtacaaaacaaggagtagatattcccatcttatagccttttaattgctttgcataagatttatatacatctaacattaatttaaattgccttgctttttcatcatatttataaagaggaacaaataaagaagaatccaacttatcgacattgaaactacatttcaaacctaatggtgccgttatgtgattctctatatagttatcaaatctttccccggaaactttttctataatagcccctaacagagtataattataattgcaatattgataaccttcacccggagcataatcattataacataactgatatttattccctttttctgggtttatatgattaaaagaattatatcccagtttatcatttatgctagaacgatgagataataacatttttattgttattggaatatacggataattgggattagaaattttaaaatccaaaaaatgatttacatgatcattcagattcaatttcccattttctaccaactgtaatattgccgtagcaacaaaagtcttagaaatagaagcaatcctaaaaatatgttcatcgcacaacatctctttcttggcactattagatgaatcaatagatttattaccaaatgatttttgatatactatttctcccttattgactactgcaacagataaacctatcacgtgaagctcatccattatttctttaacttctgcttctacttttttcagcttttctcttgaatattgcgaatacacctgattgcaaaagagaaacaataaacacaacacaaaaaagcgtaccatcaatgttttcttatactttttattcgtttggcataagctttcaaagtatattctccctcttgcatcaatttataataatcctcccgtaacaaagaaaaaaagagctgatcatgataaattccatttttataaacagcttgtcgctttactccctctaattgaaatccacaagcttccatcattatttttgaagttttatgttcagccaaacaagcacctgtaaaacgatttaaattcatatgatcaaaaactaactctctaatcatttttccaacttcatatctaatctcaccatctctatattgtctatttccaataataattccccctccatgagcacaacgattaatataatcaatattattaatagaagtatacccaatcatctcacacccaccttcagctaaacaaatggctaaataaagttccttagtgttattcatcattttttgtttaacccactctttctctatttccgaagaaacatatctgaaattacctgaaagaaggttctgaatctcaggatcattcctccatttatttatcaaaatataatcttcaagctcaaatcctcttagaaatatcttattattatccatattctatccagctataacactcaaaataatatccatttcacgaaacccataacgttgatctattggcaaaggaagaatcttattcgccaattgatattccaagtcacaagttgtacaccattgaaatatattaggccaataagttgcaacatatatcttattagcaagcaatcggtttcttatttcaaaagcattttctgtataataaggatataccatagggcatgaaaaagccatatttaagtccaacagattcgttaaatacaaattattatgcaaataagaaaaattgcgtaatctaatctctttgatttgctcaaagtcaatactaaaaagcaacgctcgcgttaactgtgacatagttttcataggctgcatagaaagtaacttgctattttctctaaagtcattatatccattcgaagccttctcatcataacgcctcaataaatgactgcaacgagaaaaagatatatccatttcaagctgagaatccaaataagttaaatccgaataagcaattccaccatctggtacccctacaaacttccgaggactataaatgtaagaggggccagcagtaacatcagaataaaaagattgagcattatcaacgataagcctatcaccgtacacttccgaaagagacttaacatattcatctttcactccaaagtaattagtgtagagaataaactctccagaggacaatctttttaattcataaagttccaattgttgattaattgaataaaatgaataatcaatattcaattttatgagaggttctaatatagtgtcacatgtataatatggaatccataacctctctattttttttgaggacaaaacatattctaaagcattcctcccagaattcagcagaaccccatcatcatgaatgaatttttttcttttacgtgataattctaaatggaaatagcctccgatttctatcttattcattatcataactcctctacaagaacctctacataagatgacggagagttaaaaaaatcatccatatcactatatttattaaactctaataacaaaattccaattgtttcatttgaaccaagaaaagcattaatagtatcaccctcttccaaaaaaatataactaccattaatttttccttgaaaactacctagtaacctgtatcctttataaataccagaaatacgactatgcaaagcataatatgcaaaaacatgcttattgatatgacaacatataggaaaagtatttcccaaagaggcttcaacggccaacgcaaccatattaacacctgtataattataaattacttcaggtatacaattaccaccattacgaggtcccaattccattaaatatattttatcatttttatctaccatcacctcaagattgaaggatagtttttttaaaccggaaaggctaatcgcacgctctatttcattagtaatcctttcctttaaagatgcagataacaaagagggaaacttcataccacaaggtacatagccattaatactattatccactacttgatccccataacaaacaaattctaagcgtgatgtaccaaaaaaaccgtctcctcctatctgaggcccgaccttctctataaattcttcaattaaaacaatttttagccttgaataagataatgcaaaatgaaaagcatcagtaagtccatccttatcaaataccttagaaattcccttactacctgaagaatcaacgggctttaccatcacaggatattcccaatcgtcaacatctacctcttgaatatcaaaataagatttagctttcggaacattaaaaccattctctctcaaaaattgacgccacaagtgcttctctccaaaaaggcaaatcttatcaaaagaatttccaggcaagcccaatttttctgaaacataagcagatgttggagctgccggatcagatgcaaaacaaagaatgccatctacatgaagagaggaagctaaatctaagactttttctttgtcagtagtactaatgttatagtattcatcagccaatttatgtcctggattattaggcaaataatcacaagtcacaacatagtaccccttcgattttgcatatcttatcgcgggaatttgaaaataggtaccacctaaaattaatatttttttcatccctgttgaaaaatacaatttaaaattttatcagtgtcttggggtgtcaatccacaatacattggcagacatatcacactatctgccatttgagttgcaatagggagattataaggactagcagactctaatcctcgataagtagaaaattcacttatcaaaggataaaaatatctccttcctaaaatattctgttctttcatcttaaaataaagttcatcacgggtcataccataatcttccgcatcgacaaatactggaaaataagagtagttatgacgaacccctaacatatcatccataaaacgaatgcctccaatattttttaacccttcacgatattttaaagctatttcacgacgagctgcaattgcagcatcaacctgctgcaaattcaacaatccatatgcagaacgtatctcgtccatcttaccattaataccaggagcaacaatggttgtttcacccgcaaagccaaagtttttcaaatagtcaatacgcttctttgtattttcatcatgacagactaaggcaccgccttcaattgtgttataaaccttcgtagcatggaaactcaaagtagacatatcgcctgcactcaaaattgaatttccatttacctccacaccaaaagcatgagcagcgtcataaatcaccttcaaaccatacttatcagctattgcttgaatacgttctgtctcacaaggtctaccatagacatgtacaggcataatagcagtagttttaggagtaattgctgcttctattttatctggatcaatattacatgttatcggatcaatatctacaaaaacaggttttataccattccaccacaaggcatgagtagtagccacaaaactatatggagtagtaatcacctcacctgttatacgtaaagcttgtaaagcacaaatcaaaggtaaagttccattagtaaataagcttatatatggtactttcaaatattcacataaagccttctctaattcttgatgataatagccattatttgtcaaccacttacgctgccatatatcctgcaaataaggtaaaaaatcatctaaagagggtaataaaggagcagttactgtaataactttattttccattctaatatattttttttactcgttttaacaaagaaattagcatttgtcggacttcaatatattcttctagcttcagcttctcataaattacaacagataatacaagcccaagcagacattgcattggaagaagaatatacatagaaatatctaatagagaaagacaccacatagctgcagctgtaacaaaagaaactccaaaagtgggaagtatatcttctatttgatcttttgtaggatagtttatcaaatctgccgaataaaaactattcaaaaaatatgcaataaatgaagtaaaaacactcccccaaagcatatattcaattccataaaatattccaataattataggaccaacagctattattttctttaaaatttctagtttaagaaataaatcagaacgccctttgacttgaagtatattcaaattaatagcatggagtggataaagcataccagcaaaacaaatgatttggagaaaagaaactgccatcaaccacttttcaccaattaaaattacaattagtggcttagcaaccgctgccaatcccaacatacaggcaaatgttactaacattgttacttttatcactttacgataggcttgcttcaatcgttcagactcatcttgcatagagcttaaaacaggatagctcacgcgctgaacaacagatgtcaaattactagaaaatataatattaaattgttgagcacgagtatattgccctagctgagcggagctataaaaacgaccaataatgatataataaatatccttataaattgtatttaacagccctgacaaaagaagtttagatccaaaaccaaacatttctttaaaactcttccttgaaaattcccaagccggacgccaatggcaaaatatccagaggaataaagtattcagaagttgcctggataattgctgtcctactaaactccaaactcccattccatagaaagccataccaataccaacaataccactgaaaatagaagatattaaagaaaccttagtctgaaccttaaactctacattcctaataaaaatagtccgtggaataattgctaaagcatttattataagcacccatccaataacccgcgtcacttctaccaaaacaggttccttgaaaaaattactaatagccggagatattgcataaagtaaaatatataagataaaactcacaaacaaattaaaaaaaaacacagtattataatcaatctgtttgatctctatcttacgaatcaatgcattagaaaagccactatcaataattgaatttgagactgctataaatatagcaatcatagccattattccatactctgcaggagataacaaccgagctaaaactaatcctaccaagaaagtaattcctgaatttgctatattatcaacaaaactccaagcaactcccttgactgctttatttttaagagaactagacacgaaaagtaaattttaagtctaaaccttacactaatgtagttaaataattaacctatatatatgctctgacatcctttagcaacagagaaaatcaaaagacatttacaagtcatcataacaacacataatacttagctaaagtataatatagaaattcaatcatagttctcataaacaatagaaaccggggacaggaacgactgaggatgatttatatttattatgcgtagaatacagacgctccaaacaaaatccccggttatttttttactaatcgacatattcccatggataggaattttcttccatattacggagttcttcagccgcctcaacctgttcggatgtaagagaagtctgtccccacccatccacaatcttacgggcagactgcaacaaagcttcttcataagtctcaccataacaataggttaacagcctgactttgagcaaggagtccggaagccgttccaaaacatcacaagcacgcacaagaatctcttgctttttctgctccttatcaccataattgtatatagtggcattgtaacccatcaaaagagccagacacaagttggcctcttcttcgatatcggaactttttgcagcaaaaagagaatcggattttaagagaatatctttattctgacggcaaaagtcatcagaataaagaggctcaccatccatgccgagatacattaaagtatgggcggcatgctgaagctcaacagcacgagaaagtaaagaattcattttataattgagatgatattattttataaactttagataggatttgggcactttgacgcttgcgaccaaaacgcccttgatacggataaccacataagttttattagcttccgtagcaacctcaccttcaattccactgaaatcccccttgacaactttcactttatctccaatagcaaaaggttcgttatcaaagttaaccccatcaggattcaaatccatcacaaacatgaagtcttccatctgcttatcaggaacaaccaacatggaatgagtaaatagatccttcatgtagaaaagctggacattataaacattggatatgtcgcaagctgtttgtttagtagcacagatgaagattaaatttcgaataacaggaacctcactacgtttacggcgatacttcagctgtgatatcacaattcgcgtgggaagataatagtcaagatccagcttctcttcggacttaagcttatctaaggattttcggacagcaaactcttgcttatcacgagtgcgggcagcaaaccaatatttttgattttcaatcacttgcaaaaagagaatcgaggattttactatagtttcgggtgcgcttcgcggtttgaacgagacatattctctttcaaaccgtagcaaatagatatttcaacttaatgcgttataaacgaagatattaaattcaaaaaagcgttttttaatcgttcgtttaatgggcaacgccatcatgtcttcaaaatagaagtttgaaatcataaaaatgagaggatattaaatatatacattgtaaatattatcacattgattactaacaacataatagagtaaatctgaaataatagaaatatttttattaaacatcttgcacgttcaaaaaataccccttatctttgtgcccattaaacgaacgttttctggacaccccccatttttcactataccattctaatttactgcatattacatctgttcgaaaagtatttatttcattttattgtctctcctctattctgcacatcaacaatccttttatctttgcgcccctatttataaattaactgtttttaattaaagaatttttcaaaatgagtaattcaaaaaaaacgctgctaaaagcgaagaaacagggttagtaaaaccaagtgaacaaaacagacaatcctctgaacaagcggaaaataaaccacacagaggccgtcctaagggtaaaaaagttaaaggaattaacaataaccaggaaagcatgctgggaaatcttttggatgaatacatcgagggtaatttctacgttggaaacaatgaaaagattccacccgaaaaactcgaattggccccgcttatagagcgcatagcagaaaccaaactcttcctaaataatgacggaatccctatgtcaaagagtactttaaccaaaatggcagaaaaaatgtggcaaaaggataaaagagtacgacacaatgaaaagcataaggagaaatcaccctacagaaaagacagaaattaaaaagatactgccaaaacagcaagacctacctttgccctcacgttaacaagaccaagtcagacctcaatgagatgccgcttcctcttatgcgaagcgacatctttttttatgctatggcatgagctcgaaaacgtaaccaacattattattaattaaatatatcgtaagatgaaaagacacgagttcaaaaatccggttccagtccgtgaaagaatggcagaaaaatggaaaaaacggttcatgttcgaaaaggggtattctgaggaatgtgcagaatacatggcacaaagattgatcgacctcattgaccacatgcagtatggctatgcccttattgcctttcacaaacaaggcacaatcttcaaaatggtgaaagcaaccctcataccctatgaaagtttctttcaccgattctatgaaatggagcgcatagaaagtactgtagtttactgggatgtagagtcacaggcttggagaagtttccagttggaaaatttactagactggagccccgtctgctaatcattaatcacttatcgtttaatcactaaagaaatggcaatgaattgtacaggggtactgtatttccccataactataagtctgctcgaaggagtagcaacagaattgatagaagcccggttcgggctgaaaggtgtagcggcattcataaagctactcggaaaaatttataaagaagaggggtattacctggtgtggaacaaagagcaatgcatgctctttgcccacaaattaggaaacgaattatcggatgaggaaatgcaggaaatcgtagaacttctgatagcgaaagacatatttgaccggaaaatgtatgaggaacatcaggtattgacatccgtacacatacagaaagtatggctggaagctaccaaacgcagaaaacgggacttaactcccctcccttacttccttatggaaaccaaagttcctaaaaacgggaaagaagaaaatgagatacaggatgtattgtttccaccagaaaatgcatgcaattccgaacaaagtaaagaaaagcaaagtaaagaaaaggaaaacactccccctctaactccccaaggggagaacggaggtgaaggaacggagggctcttctttcgacatcccgggatatgcctacaacaagaagacacacaatctggaaggtttgatgttggagctgcaacaacttcatatcgtaaaccgaaatgaaatcaatgccattctacggctatccgactacggaagactaggagggtatgtgtttaaaataatcagtagtacacgatggagtactgtactggcaaaaggaaaatacgtcatcgccgcactaagaaaagagaaaaccggaaacggctgataatcaaggctaatatcagcatttgccaaggctacaccctttgcctcctatagctacaccctttatgacaaagggctacaccatacgggcgaaagggtgtagccatcctaaagtacccgtcaaggcttacaaaatatacatcaatgtataatacatcaatgtatatttttgaaataatcatatacaggtagtacacgcaccgttttatccccaataataaacttgtcacgctgattaaatgacagcaataatccctcaggcagattaaaaaaggtcaaggcgtccagcagtccttcaacttcacgcttcctgttttcggcagtcaatgaatagcaaacctgaatagctaaacagggtacactgttttcagctataataaagtcacattctttctgattctcattataataaaaaatttccgaataacggcgacgcaactctgcaaagaccatattctccaatcgacgtccttcgtcacgggtaaatgaaggagaggctattgaaactacaccattatccacgcagtacactttcttaggatttagcaactgtgccttataagaatatgagaatctcgggacaaagcttattaaataggtttgctcaaaataagaaaaataatccgatacagtagacgtacttttcactccaagcacttgcttgagtttattggcggaaaccaaatttcctatattccctactaaataagccaataaactttttaatgaatgctcatcacgaatattataccttactgcgatatcacgatagacaatatcattgaccaaatcagataacacatccggattatctaattgcaagtattgcggaaagcctcctttatataggtaatcatataaagagccttctccaatctcttgttctttataaccacaatattctgcataagaaaaaggaaaaagttctttagtaatgtgccgtccggtcaatttggtccccaattcacgactcaacatggaagcattggaaccagtcaccaccacatagaatccttcatccagcttacccctgacatacacttcccatccctcaacaacctgaacctcatcgaagaaaagaactctacacttctcattttccttaattacttcatctactatgcggaaatcgttaaactcaaaaccatataacagaggagtatcaaaattcaaaaaaacagtctcttccaactgatatttatccattagcatctgaaacagcaaagtactttttccacaccggcgtatacccgaaataattagtgcataatcctgcaataacggagaaagagaagataacaaatcacgcctgtatccctgacctttttttatccgctcaccctgcatgcggattgcttctatgatatccgaccgacttatcataatatttatctttttaagttcaagtgcaaatataggcattccattctgaatggacaaatctatccattctaaatggatactcctttccattctgaatgaacagagaaaaagaaggggctaactcctcaattggagccagccccttacatataataaagagattcttctcaattaccgaacggctatatgagtattttgcaaagaagcctcatttgctcttgtcagtatagagatgagactcgccctgaatatactttcaatgatttctattttagaatgtactatcaactcttgcatcatttatctgacatggagaatgaatataatgtcttttttgatatcaaagatacatgtagccataagaagctccatacattacaagatattttaaaatggaactcttctatcagacactttcagtttatccgttctcatgaaagttattttgtgcagttggcagatatattaatgggagccattaactataatctccgaattgaaaaaggtgatgtggaaggtaaggttatagcaaaaagaaaacttgttgacaaaattcaagaacacgcagatatctctttaaacagaacaacgccactatcaaagaaaaaatttaatctattctttatctcactaaaataatagttatgccttttaatctactgaaaaaatatccggaattacttgaaattctacacatgaatgagcatcaacgtaaagaatctcttatgagaatctacaaaagagatatagaagataatccaaatttcaagttcagagagaaacaaatctatccgaccaaatcagatggagtggctgatatggggcgacaatttacgcaccttacttgcgaagaggcaaaagaaacagatgagaatggtaatttgcttccagccaagcgagtttttgaaaaagaccgttctcaacgattgcattggatcaatcatcacattcaagaattgtcttctgaaaatatagaagtcttcagtgtgacagaacgtgatcagaaaaaacgttgcgatattaccaaaacatatgtttacgataaaaaagagaaatatgtgatagttctcgaatgccaaagaaaaagctcttattacttattaacagcctattatctgaataaagagtatgcggaaaaaggcataaagaaaaaaatgaagaagcgtttaccgaatattgaataaaaaacgcagggctcagatttatatcaagataaaccgagccccgaaactccttctatttgtagatgagcgttgcaaatatacgctgatatatttaaatatacaacattttttgcaccatgattgtttatttaacaccttgaaataatcatattcagaatgcaaaaaatagcggtcgactcacaaagggagtcaaccgctactaaatattaatataaaaacgctttcttgattagagagcacctacttctttcaatgcagcgttagttccgtgaacagccttagcgctggcagcgaatttttctttttcgtcagcagtcagttccagttcaacgatcttttcgataccattcttgcccaagataacgggaacaccgatacaaagatcagattcgccatattcgccttccagcaatacagagcaaggaatcatcttcttctggttgtggatgatagactcaactacataagctcctgccgcacccggtgcataccatgcagaagtacccagcaacttagtcaaagtagcaccacctaccatagtagaagctacaacttcgttcagtttttcttcgctcaacagtgtgctaaccggttgtcctttgtatgtagccaaacgagccaacggaatcatagtagtatcaccatgaccgccgattaccataccttctacttcgtttgcattgcaacccaaagcttgagacaggaaatatttaaaacgagagctgtccaaagcaccacccataccgataacacggttcttaggcagacccaaagatttcaatgccagataagtcattgtatccatcggattagaaataactacaaggatagcgttgggagaatatttcaatgcattttcagcaactgttttcacgataccggcattcacaccgatcaactcttcacgagtcatgcccggcttacggggaatacctgatgtgataacaataacgtcagaatttgcagtcttctcataatcgttggtgcagcctacaatagtggtatcaaaacccaacaattgagctgtctgcatcatatccattgccttaccttctgaaacgccttccttaacatccagcattaccacttcgtcagccacttcattaaaggccaacacattagcgcatgtagcacctacgttacctgcacctactacggttacttttgacataatcttcaattttttgtttatatgtgtaataaagttgcgacaaaagtacaacgacattcgtaattaaggaaatttttccgtaataattttagttaaatgattattaagttaagggttggtgattagcgattgacgattaatgcttatttttgcggcggaatagacctaaccctattttacacacctattatattaatgaaacaatatggcaaataacaaaaataagctggtgattattgcaggtactgtattagtattagccttggtgggcgtcactgtattattactcaccgagaagcagaccaacaaagaactggtacaggaatttcaactggaaaaggaagacctggaaaacgaatatacacgctttgcacaacagtatgacgaactgaaattaacagtctccaacgattccctgtccgtactattagaacaggagcaactgaaaacccaacgtctattagaagaactgcgtaccgtaaaaagcagtaacgccgctgaaatacgccgcctgaaaaaggaacttgccaccttgcgtaaagtaatgataggttatatcaaccagatagattcactgaatagactgaccgcccatcagaaagaggtaatcgcacaggtcacgcagaagtacaacgatgcttcccgccaaatcagcaatctggcggaagagaaaaagaatctgaataagaaagtcacccttgccgcacagttagatgctaccaatatcaatatacaagctgtcaacaaacgggataaagtagccaagaaagtaaaagacgtggtgaaattcaagataggatttactatcgtcaaaaacatcacagctgaaacaggcgaacgtactatctatgtccgcatcaccaaaccggataatgacgtgctgactaaaaacccttccaatacattcccgtatgaaaaccgcgagttggggtattccatcaaaaagtacattgaatacaacggtgaagagcaaaatataaccgtgtactggaacgtagaagagtatctatatgcaggtacctatcgggtagatcttttcgcagacggaacacttatcggctcgcaatcctttacattggactaaaaaagattaaattattttgaggtctcactgaaagcctatacatttgcatcgttgtttatgcaattattgttgcatcacaaaacaacgttttaatcaccttaataatgtatagacacgatgagaaagttcttctgtttcatttggttggtatgtctgaccttctctgtcggtgcacaagaggttttgagcctcgatagttgccgtgcattggccattgccaataacaaagaactactgataagccaggagaaaattaactctgcacattatcagagaaaagcggcgtttaccaactaccttcccgatatttccgccaccggtggatatatgcgtacccaaaaagagatttcactattgagcgatgcacagaaaggtgcattaggttcaatgggaactcaggtaagcggtgccatgcaaaatggtatacaaggtatactgacacagcaccctgagttgacacagaatccgcaattcatggcgttgatccaggcgttaggaagtgtggacgttgcctctccgctcaacggcctcggaaattccctcgttgacgcatttcgtacagatacccgcaacatgtatgccggcgccctgacgctgacacaacctttatatatgggcggcaaaatccgtgcttacaacaaaatcaccaaatatgcagaagaactggcacgtcagcaacatgacagtggtctgcaagatgtaatacttagtaccgaccaggcttactggcaggtagtgtcacttgccagtaaaaagaagttagccgaaggttacctcaagttactgcaaaagttggaaagcgatgtggacaagatgatcgccgaaggtgttgccaccaaagcggacggtctatctgtaaaggtaagagtgaacgaagcggaaatgacactgactaaagtcgaagatggcttgagcctgtccagaatgttattatgccagttatgcggtttggacttgtcctctcctatcacgctgaaagatgaacgggaagacgatctctctcctgatccggtagcagcaaatggaattgatctgaatacggtttatgctacacggccggaagtacgcagcctggaacttgccacagaaatctacaagcagaaggtaaacgtcactcgctccgaatatctgccgtcactggctctgatgggaagctatatgatgaccaacccctccgttttcaatggttttgaaaagaagttcaaaggtatgtggaatgtgggcgtggtattacaagttcctatctggcattggggtgaaggcatgtacaaggtgaaggcagccaaagcggaagcccgtatcgcccaataccaattggacgatgctaaagaaaagatagaacttcaagtcaaccagtccgtcttcaaggttaatgaagccgctaaaaagctgattatggcagaaaagaatctggaaaaagcagatgaaaaccttcgatatgccacactcggatttgaagaaggcgtgatagctgccagcaacgtactcgaagcacacacagcctggctttcagcccagtccgaaaagatagatgcacaaattgatgtgaaattgactgacatctatctgaagaaggcgttgggagaattaaaaattaataattaaaaattaaaagggtgagaattcataattcataattcataattcataattacctaaatggataccaaatcacaaaacagtaacatgctattagcgtttttaacgctgacaggcgtcattgccattgtagccgtagtaggtttcttcatgttgcgtaaaggaccggaaatcgtacagggtcaggcagaggtcacagaataccgggtatcgagtaaagtaccgggacgtattctggaattccgtgtgaaagagggacaaagtgtgcaagccggagatacactcgccatactggaagctccggatgtattagctaaactggaacaggctcgtgcggcggaagccgctgctcaggcacagaatgagaaagcactgaaaggcgcccgtcacgaacaggtacaggctgcctttgagatgtggcaaaaagctaaagcaggacttgaaatagccgagaaatcttataaacgtgtgaagaatcttgctgatcagggcgtgatgtcagcccaaaagctggatgaggtgactgcacagcgagacgctgccatcgcaacagaaaaagccgccaaagctcaatacgacatggcaaagaacggtgcggaacgagaagataaagccgctgccgccgccttggtagaccgtgccaaaggagctgttgcagaagtagaatcttatatcaaagaaacttatcttatagcccaaacagccggagaagtttcggaaatcttccccaaagtaggtgaattggtaggaaccggtgcaccgatcatgaacatagccatactgaatgatatgtgggtaacattcaatgtccgggaagatttgctgcaaggtctgacaatgggaactgaattcgaagctttcgttccggcattggataaaaatatccgcctgaaagtgaactacatgaaggatcttggtacttatgctgcctggaaggctacgaaaacaaccgggcaattcgacctgaagacttttgaggtaaaagctttgccacaggagaaagtggaaggcttgcgccccggaatgtcggtgatactgaagaagtgattaacggttagtgattagtgataagtaaaggaatggcacgagataagaaacatatagctttgtggaacgtcatgaaacgggaaggccgacggctcgtttcccgtccgctgtacctgttctgcatggtgatagcgccgttgttctgctacgtgttcttcacaacactgatggattcggggttaccggtcaatatgcctgtaggggtggtggatcaggatatgacatccacttcgcgccaattgatgcgaaacctggatgcatttgagcagaccgccatcgtagcccattatcctactatcaacgaagcacgtgccgccatgcagaaaggagaaatctacggattctactacattccgaaaggtaccaccgccaaggcgcaatctcaacgacagcctaccgtatcgttctataccaacaatacgttgcttatcgccggttctctgctctacaaagatatgaagatgatgagcgagttggcatcgggagccgccgcacgcaccagtttgtatgctaaaggtgctacggaagaccaggctatggcattcctgcagcccatcgtcatcgatacacatccgctgaacaatccgtggctgaattactccgtatatctgtgtaacacatttgcaccgggtgtattgatgctgcttatatttatgataacggtttactccatcggtgtggaaataaaagaccgtaccgcacgcgaatggctgcgcatgggaaataattccatctacatctcccttgccggaaagctattgccgcatacggctattttcttcctgatggggatattatataacgtatatttatatggcttcctgcacttcccctgcaacagtggcatcatgccgatgcttcttgccaccctctgccttgtactggcttcgcaagggatgggtgtactgatgataggtacattgcctaccctgcgtctgggactgagttttgcatccttatggggggtgctttcattctctatgtgcggactatcattccctgctatggccatgcatccggttctgcaaggattagccaatctgttcccgctgcgtcactatttcctgatctatgtagatcaggccctgaacggttatccgatgatttattcatggataaactatgtggcgttacttatttttatgatgcttcctttctttgtcgtacaccggctcaaagaagcgttgatttattataaatacgtgccctaatgaaacatctgacgttcaaacagaaagtagtacaaggtatccacgacctattctatatctggatacgggaattccgcacgacctttcgcgatcagggtgtgctcatcttctttgtgcttgtcccgttggtgtatccactgatttatgctttcatttataccaatgaaaccatacgggaagtacctgctgtggtagtggataactcacgcagttcgttaagccgcgaatacctgcgcaaagtggactccagtccggaagtgaagattgtatcttattgcgctgacatggaagaagccaaactaatgctgaaagatcgtctggtttatggcatcatctatatacctgctgaattcagtgaagatattgcacggggaaagcaaacacaggtcagtctgtattgcgatatgagcggattgctttattataaatctctgctgaacaccaataccagcgtgtcactggatatgaatgcagatatcaaaatgcaacgtgccggcaatactaccaaccgccaggatgagattaccgcctatccgataaaatatgaagatgttaccttattcaaccccgcaaacggttttgcggctttcctgatacctgcggtattgatactgattattcagcaaaccttactgctgggtatcggactttctgccggaacagcccgcgaacagaatcgtttcaaagatttggttcctatcaaccgccactacaacggcacattacgtatcgtattgggtaaaggcttaagttatttcatggtgtatgcacttgtatccgtatacgtgctctgtgtagtgccacgcctgttcagtctcatccagatagctcaaccgggtgtgctgaccctctttatgttgccttatctggcagcatgtattttctttgccatgacagcttctattgccatacgcaaccgtgaaacctgcatgttaatattcgtcttcacatccgtacccttattgttcctttcaggtgtttcctggccgggagccgccatgccggatttctggagatacttctcttatatcttcccgtccactttcggcatcaatggctacgtacgcatcaatagcatgggagctacactcaacgaagtagcctttgaataccgtgcattatggatacaggcaggcatctacttcctgactacctgctgggtatatcgttggcagattatccaaagcagaaagcatgtgattgagaaatataaagagtacaagaataaataataatttcaggagattattatccattctgcaggacatcttctttctccggagcagtaggctccggcctcctttcaggggcaaacgggtcaaaataataaatatctttggtatccagccaatgcaggaagaaaggtaaacgtcgcataaaacgactataatctttccgtccggcaggtgtccaggcagcctcggcaagtgcaataagacgtggaaagaccataaaatccaatcgtttgacatcagccacacgttccgtccaaagtgaatactgcatacccataatctggctttcgtaccccttaaacagatgttctatcgagcgagggaatgagaagacatcttctatcggattatatccatcccagtaacgcccaacattgtgtgtggaatactgcacaaagtcgccatacatcggacgacgcggagtcataataacacgatatccactttcgagagctttgaataactgatacctacgatcatgacgccaccacatcactactgctttatccggcgatacaccggcatccacaatctcatcccacccgatcatcgttttacctttggcagcaataatatctgccacacggcgtacaaaatattgctccaatccggtttcgttcattaattgtttatctttgatgaactgctgtatttgtggatctgtaaaccattcctgattaccaaaatgtacttcatcacctccaatatgaatataaggagagggaaacaaagtgatcagttcatccagcacatcacttatgaaacgaaacgtttcttctttgcacgggtgaaaagtaaaatctttccatcgtccttcacccccaccagacaattccggataagcacggcaagcagcagtggcatgtccgggcatatcaaattccggcacaatcattatgtgtcgtgcagctgcataagcaacaatatctttaatatcctcctgcgtatagaaagcagcaggtgacgacggatcatgataattccctttggatccaacctttgtcaacagaggatacttctttatttcaatacgccatcccggttcatccgtcagatgccaatgaaaaacattcaggcgaagagaagccattatatcaagcaattgcttgactttctccttgccaaagaaatgacggctctcgtcgagcataaaaccccgccacgaataacggggagcatcattgattacacaagcgctcgtagtgcctttcccggaacgcaaaagttgcttcaaagtttcttctccccggaatgctccggttacagtagtcgattgaataaaaacagaatcgggagttatctccaaacgataagcctcatcagcccccgtagtgcaatccggtgcaatacactgtaccactcgtgacggaagtacattatttgtctcaagtgccttattttcggcaatagacagtacgaactctccttttgccgggcgatattgtgccggttcaggaatcacattttgtgcagagataaagactggcagaaaaagactcactgccaacaggttaattttagttgtcatcattgatatattttaaaacaatttccccacatcgaaagataacgaagtggcagaatataatttcatagaataataaaatagaaaaatttaccgggtatgttttttaattaacggatataatacttccgcatagcgcataaagcccagatctgtaaaatgaataccatcaacagtagcctcaccatcgtgcccgatgatatcctttgaagaaagaagatagatattcttctcacccgttttcttcattgactggaaaatagccgcaatcgtttcatttttagctttcacttcccgagcaacccttttatcaaaacgggaatgagtgaaaataggatcttctacaaaaagtatgggagtatcgggatgtttgctgcgaacgatagagtaaaatttctccgcccgttctttcatatgttccactgtggcgttaggaaggaaatcaagcacaaacatggaagcatcgaccgtagctataagttccgcaatctccagatcgagtaaagcattaccgctaaaccctaagttgatacattcacgattgagccaacgttccagaatatttgtatgggccattccgggacgggaagcacaaccaccctgcaaaatactggtcccataaaaaacaacgggcttctcacgtaccggcaaatcaacagtaggctggtcaagcgtagaaaggctatccacaccgatttccaatgaggtgaccccgtcatacaaagagagatataaaagatattcccgttcttcaggatccatattcttcacgatagtagcttcatttacctttccctgaggacgcccgctaccggcaaaaacccacttaccatcttgcagacaataaagatccaatcctttgattccggtaggagtcatgtggttcatgcttctgttatccctcacttcccactttgccccaatgcatgtagagttggaacggaagcgcaaagcaagtccggcactattgcgtcctaaatcccaaagcggtttgcgggaaactgattccaaagaagccggaaggcgctcgtaacgggtaagagtagcatccgttgccttgcccaacaaggggaaaacggaagcatcgcgataaagaagttgggcctgagtggatgcagccagcaacaatcccaaaataaaaactctgattctcatgattagtagatattaagatgattcaaaggtacactgaaaaactgcatttataaacagttttacatcaattaacaagtaataggcctcctattatggctccacagctcttttgagtgcattcacacttattaaccgtctgaagtttgctttattacgaaatattcgtagttttgtatcgaattcattttaatactttatttccatggaaaagttgactatacaagaagaagaagcaatgatttacatttgggaactgggcagttgtttcgtaaaagacattgttgccaaatatccccaaccggcacctccctacactaccgtggcttccatcattaaaaacctggaacgcaaacagtatgttacagccgctcgcgtagggaatacatatcaatacacacctgccattcgtgaaagcgaatacaagcgtaccttcatgagcggcttcgtgcgtaactactttgaaaattcttataaggaaatggtttctttctttgccaaagagcaaaagatttcaactaaagacttaaaagatataatagatatgattgaaaaaagataaacataaaaaagaatcgcatgaaatactatttttctttattagcttgtctggtaagtttcattgctcacgcacagactacttactcctatagagtagaaggcgaattgacagataattcgtttaatggaaaaatgttatacatcatgcgatatgatgacaatcgctatattgatagtacccgagttgaaaatcagaagtttgcatttgagggacggactgcaatcccctcgttttgtcgaatcgatgcaggacgcaactatggcaactttattttggacgaaggaactataaaagtcaatctatatactcatgtccctacgggtacaaaactaaatgaagctttcaacaagacgatagctacagtcgacagtatccgaaaaaaaggattcgcacatctggcagaacttaaaaaagaaaagccgaatgcagaagactggcaaccggtatggacagaatattatgagcagaaaatccgcccatcactccttggatatctaaaacaacaaattatatccaacaaggataatggtgtgggagaatatgctttcagaaattatagtatggcatgtaataccgatgaaatggatgctcttcagacagaaataggcaattggctgaattccttaaaaacagtacaggcaataaaagcacgtttcgaagcactaaagagcactgcagtaggcaaaccgtttgtcgatatagccggtgaaaacacagaaggtaaagaaacacgattgtctgattttgtaggcaaaggtaattatgttcttgttgatatgtgggcaagctggtgtgctccatgccgggaagaaatacccaatttagcagaaatctacaatacatataaagacaaaggcctggttatattaggtattgcaacctgggataaaaaagacagaattattaaagcgataggagatctgaatatgacatggccacagctactggatacccgacaaaaagtaatggaactttatggcgtcaatggtatcccgcatatcattttatttgccccggatggcactattgttgcgcgcaatctcaggggagatgaaatgaaacaaaaagtggctgagattatgaaagacaaataataacaaaacaaatcaagatgttagcttattttctaaaaatcaatgtagccattgcgctattttatgcgttctaccggctatttttctataaagacacgttcttcacgtggcgcagagccgctttgctctgtttctttgccatttctgccgtctatccgctactgaatatacagacatggatcacggaacaggagcctatggtagccatggcagatttatacgctgacatcgttttaccggaatttacgataacaccggaacaggcaacttccgactggaaaaccctcctgcttcaaacggtcggttttgcttattggggaatggtaattgtattagcgatccgctttttcatacagttggctgggattatccgtttagctttccgttgccggaaagcaaagataggaaatacgaatgtacatctgctcagacaagcaagcggacctttttccttcttccactggatttttatccatccgacttcacatacagaagatgaactaagcgaaatattaacccacgaacaaactcatgccaaccaatggcattccattgatgtacttgtcagtgagattgtatgtatattttgctggttcaatccttttgcctggctcatgaaacgggaaatccgcactaatctggaatatctggcggacaaccgtgtactggaaaccggacatgactctaaagcctatcagtatcacctgttaggattatcacatcataaggctgcagcaactatctataacagttttaatgtattacctttaaaaaaacgcatcaaaatgatgaacaaaaagagaactcgagaaatagggagaactaaataccttatgtttctccccttggcagccttacttatgataatcagcaatatcgaagccgtggcccgtaccacgaaggagatggcaaaagatgtcatagaagctgtagaagagaatctggcgtctaattcaacaacgccggagatggaagttgctactgaaacggcaccgctggaaacaccggcaccgcaacaggacaaagacaaacttgtgaactacaaaggagtagtagtggataaagacggaaaagcagtggaaggcgctgagtttttcattgacggcgaccacaaactgccacaaagtcaatcgtatgtcacggaaaagaacggtaatttttctttcaaagcattcgaaaatgctaaaatgatagtaatttggaaaaaagatggaaaaatgatgggagtacccgtcactgtcaacaaagaaaacaactccaacatgaagattgtcatggatagggaatggctaaatccaccagccgatgatcctgataatcctgtatttgaagtagtggaacaaatgcctgaatttccggatggcggcatgtcaggactgatgcaatttttatcgaaaaacatcagatatccggtaaatgcacagaaaaatggtacgcaaggacgcgttactgtacaatttgttgtaaatgcagacggaagcatctccaacataggaattatccgtggagtagacccggaattggatggtgaagcggtacgcgttatcagcacaatgccaaattggaaaccgggtatgcaaaaaggaaaagctgtacgggtgaaatatacagttcctgtcatgttccgcttatcggataatggtcaaaaagaggagtataagcctgtacctaaaattgatgaaaccgttgtcgtgggatatgttcccaaacaagtccctgcagaggaagacccggtttttgaagtggttgaaaatatgcctgaatttcccggtggtatgggagggctgatgcaatatctgtctaagaatatcaaatatccggtagaggcacaaaaagcaggaatccaaggacgagttataatgcaagtcatcattgatgaaaacggcaatgtaaccaaccctaaagttacccaacccgtagatcccttattggatacagaagcaattcgtgtcactgcaagtatgcctaaatggaaacctggtacacaaagaggaatgccggtcaatgtaaaatatacattccctatcgtattcagattacaataaaacaacctcctttcaacattaattctctctcacataaagattatctgcaatgtcctactcctgatttttaacagcacaatcaagagtaggatgcagataaccatttatttatgcatcttcactacttctgtcggtgccatctccacattccgcttatctacctggcgaaccacgcttgccgctaattgcaggaaagcgcgtccggtcacggtattctcgtcaagtgctaccggagtacccttatcgccactttcgcaaatgctttgtacaataggaatttgccccaacaaaggcacattcatttcttccgccagcttcttggcaccttcctttccaaagatatagtatttattctccggaagttcggcaggtgtaaaccaggccatattctctaccaaaccgagaataggcacattcaccttatcattgataaacatgttgatacctttgcgggcatctgccaatgccacagcctgcggtgtactgactacgatagctcctgtcagtgccaatgtctgaaccactgtcaggtgaatatcactcgttccgggaggaaggtcgattaagaaatagtcaagctctccccaattcgcatcccctatcagctgtttcaaggcattgcttgccatgccgccacgccacaacgtagcctgatcaggatcaacgaagaaaccaatagaaagcaatttgataccatacttctcaaccggtacaatcaggtcacgaccgtctacgtgttcagcataaggacgcgcatcttccacctgaaacatcttcggcatggatggcccgaaaatatcggcatccaacaaaccaaccttgtaacccaacttcgccaaagatactgcgaggttagcagctaccgttgatttacctacgccacccttaccggaagaaacaccgataatattctttacctgagacaacagtttgcctggttcaggacgtgctgcctgtttgctttccgtagtaatggttatttctacctcatcagatacatacgtatgaatagccgcttccgctgcctttattacagatttcatgaaaggatcggtcggtttctcaaatatcagtgagaaactaactttcatcccgtcaatacgtaaattatcggcaatcatttccgcctcaaccagattctttccggtaccgggatatcgcactgtggccagtgcatctaaaattagtttaggataaagtgtcattactctttttttattttgaagtttgcagcccactccgcttactgcggttataactgcgatactcatctaactctatttccacatcgggttcgtgtagttcgccttccttcggcagatgaaacttgatatacttgatgttcaatccacggtccaaccactgttgctcgtaataggtcttgatgctgagaatttcatcagccatgccggagtgatacagatcttctgtcagcacatccaccggaagatgattttcctcgatcatacaacgggtataagtgaacataaagttactatctgtcttgagatgaacaataccatccggttttaggaatttacgataacgttccatgaaataagtggaagtaaggcgcttggtagctttcttcatttgcggatcagagaacgtcaaccagatttcactcacttcattttctgagaaaaagcggtcgattatttcaatgttcgtacgcaaaaaggcaacattcttcatgcctgcctgtaatgactccgtagcaccggaccacatacgggaacctttaatatccactccgataaaattcttgtcaggaaacaatcgtcccagcccgacggtatattcaccacgtccgcaacctaattccaaaacaatgggacggtcattcccgaagaatgactcgttccattttcctttcatctcaaagggcacgttatctactgctgaataaggatattcgaacacatgcggataacttgccatatcggcaaacttcgctaacttacctttactcatgcgttattccacaatggttacccagccatgcgtgtcaggttcgtcaccatattgaataccacgcaatttgttgtacaacttcgtgcagacaggtcccggtttgccgtccttggctattacataagaatgtccgttttcaggatcatctatgcgctcaatcgggctaatcaccgcagccgtaccacatgcaccggcttcctcgaacgtagtaagttcttcttcagccaccggacgacgttccaccttcatgcccatatcttcggccaactgcatcaagctcttattggtaatggatggcagaatggaagtagacagaggagtaatataagtattatcttttattccgaagaagttggcagcgccacactcgtcgatgtacttcttctcctttgcatccagatagaactctgcggaataccctgccgcatgtgcttcgtggctggcacgcaagctggctgcatagttaccaccgattttataaataccagttccaagcggagcagcacggtcatacttacgtgtaatgacataaggagtagctgcaaaaccgcctttaaagtacggacctaccggagtaacaaatatcaggaacatatattcattggaaggacgcacccccacctgtgccccggttccaatcagcaacggacggatataaagggaagcaccgctctcataaggcggtataaagcgttcgttcattttcaccgccgtcagtacagcttctttgaaacgttctgtcggcaattctgccatcatgataccacgacacgtagactgcaagcgggcagcattctcttccaaacggaaaatacgcaccttaccatctttgccacggaatgcctttaagccttcaaacgcttcctgtccataatgcagacaagtagctgccatgtgcagattgataagttcgctactgctgatttcaagttttccccactcaccttcgcggaaattaattctcacattgtaatctgtcttcatgtatccgaatgacagattagaccaatctatttctttcatatctcaaagtattagtaatctcattacgtacattctgcaacaaatttagtctttattcttcactttcccgcttctccgacagtaatttttcgatttccttgtcagctttggtcaatttatcgctgcaaaacgcaataatctcattcgcttcctttattttttcggcaagcgcatcaatttccaattcattattgtctatttgacggacaatcttctccaagcgctccatggcttgggaataggtttcttttttctttgaagtagacataggaatattttatgatttatgatttacgacggaggtcacttcaccccgataaaaacgggtgagtatttcatctttttcattcaagagggtggcatctttcactacttttccatctttcaaagtaatgctatagccacgggcaagcattttctctggcgaagcatctacaagacgctgccgcaacaaatccaggcgatgctgctggcgcgagagagaggttgtaacagcctgtgagatatccttccgggcggtaagcaatgcaagcttggcatcagatacgcgacggacagcagcagaaggaatacggtttctatacaaggccagccttcgatgttcctccgtcaaacgggaaatcacgctgtcgtgcaattgggtgataagcacttccagttcatcagcagcaagatccatgcaatttataagatactctgcagcagcagtcggggttttcacacgggtgtgcgccacagaatcgagtaccgtatcatctctttcatgccctattccggtaattataggcaacggaaattgggcacaagcggcagcaagcaaatacgtatcaaaaccggaaagatcggaagttgctccaccgccacggatgatgactacggcatcaaaatcattctgacgacttaagattagatccaaagctgctaatacagattcttctaccctatcgccttgcatcagggcgggaaacaattctgtataaaagaaaaagtttcttggattattctttaactgatggcagaaatcaccatagcctgcggctgttggagaggatatcacagcaatgcgttgcggcaaagttggcatttccaactctttattcagcgtcaagacaccttcttcttccagttgcttcagtatttcccgacgacgacgtgccatatctcctaacgtataagtaggatcgatatcctgtacggtcagactatagccataaagctcgtgaaagctgacagtaacctgaaccagtaccttaataccggaaacaaaagcctgccctgtcgcttcttcaaaataaggtttcagcagccgatagacattcgaccagatagtaccccgcgcctttgcaaccagaccattgctacggggatctttctgaataaattccagatagcaatgcccggtactgttcgttcgcacatcactcaactctgcctgtacccaatattcatcaggcaggcattgttcaagactgcggcgcaccaaggcattaagttccagtaaagataatgcttccatattgttcagctacgagtgacaagctaccagctacaagtgacgaactacgagtaacagcttgtaatcagttatttattatttgatttataatcattgtatgccttccacatatcaggtactccatatccgtagatattatccgggaaaccggcacggtcaccggatcggcgcaccaactcaatcacttcttttgccgtcaacgtcgggcaagcctgccacaaacatgtcaccataccgcacatgataggtgaagaaaaagaagtaccgttagcccgtccctggttaccatccgtacggatcacatccgatccaacccctaccgcaaccacatccggcttcacacgatgatccgctgtattacctacggaagaaaaagtagccagtacagctctcttgtcaatcgctcctaccgtcaatacattatcagcatctcccggaggagtgatctttttccaggaacccgcaccggagttgccggcactgcataccagtatcattcctttatctgcaatatgggaagcctggcgcgacatcaatgcatgacgtccatccagatcgcgatatttataattcttcgatttatcatcaaatgagtagtatcccaaagatgtattgattacatccactcccacactatcggcaaattcaaccgcagccgaccaataatcctgttctaccaggtgttccgaatattcatcctcactgcgaagcaaccaaaaagaagcttcgggagccgtccccgtcattatatcaggtcggttcatacctatacaggacagtacactcatcccatggctgctttctgcaaagatatcagcctgttggtttacaaaatcctttgtaccgagaatacggatattctgcatagcagtaatcttatcgacattatggaatccggcatcaataaccgcaattgtcataccctgccctttgaagcccgcttcgtgtaatttgtcaccgttgctcatctgaatctgagtgatagcacgcccataaatgctatccggatgtatcgtcggttggttcaacacagaatcacgttccgtcgccatcgatggtttgccggcaccgggagaaatccagactttctctgttgaaagcacaaaaggcagtgccgcaatacgatcaatcagagtcgtatcgttgcaggacaccgttacaaaattatcccatttccccgttaccacaatcttcactccctgtttgcggatttcatctatatatttacggcataccgggagatctgtagaatcaatcggaaggttctgcttccggcggcgctcaatcgcttttgccgacaagtatttctccggtttttttaaagaatattctgtagcagctttatcttttaaactaatgcgatacttcaatgtatcttgttgcgccgatgcccctgttgcaagcagggcaatggctaaaaaggatattaattttctcattctattattttattacttattcattttctgaaataaccagcccgataccccgttgggaagcaatgaaagaaccacctactacccgccttccaatatagaatacagccgactgaccgggtgcaatagccgatgcctctgacaggaaatgtacaaacaaccgcccatcttccagccttttcaccgtacagggaatcggcttgcttcggtaacggatgcgtaccgtcaaatcggaagccgaaaagaattcctgctcatcaataagattatcctgtttggttaacatatattctgtccgcaattgttcggcatcacccagcatcaccgtatttttctgcggatttatcttcaacacataagccggtttccctaaagctatttccagccctttccgttgtccaatggtataataaggaaaacctttatgctctcccaacttcactccttcggaactgacgaaccatccgggaccaatcgcactatctatttcaggagaatgttcgcgcagaaagtcccgataatcacctttgatgaaacaaacctccatgctctctccctcttccgccttcagttgataacctttctcacgcagatattccctcacttgcaacttcgtataagtgcccagcggaaaaatgcaacgcctcagcacatcttgtcccagtcgccagaggaaataagactgatctttcttatcgtcatctccggccactatatatatctttccattcttttcttccagacggctataatgcccggtagagataaatgcgcaacctagtttgtctgcccactctgttagtatgcggaatttaaaggtaggattacacatcacgcaaggatttggagtccgcccctgacaatattcatcaataaagttctgcacaattactttgcgaaaagcctcacgttcatcagccacatggtgttcgatacccatactgccggcaagttgccgagcttccacaggttcgtctccccacacccacatggtcaatccgactatctcatacccctgttctttcaacatcaggcaagtggcagtactgtctataccgccgctcatacccaccaatactcgcttatcaggactgttcatttttagatattcattctattagcttacaaaaatagatgatttcggggagaagaaacagaaaaggcatacctttttcacatgacttcacatcattctctttgtttctccctacctttccgtacctttgcagctacggagaacttacgagttgtacaactcgcaagttctccgtagtaaacaagaataagaatagtaataagttcacagcttagaagtcagcgtatctaaagtctatttcatggcagaccgcaacttgctcaaacgccccaagaaaatagactgctatcgcataccattgagctattatctccccaaagaactgttgacacccgaaattctggaagaagaaaaaggattgaaagaggaaggaattatataagatatatacatagactttaaacaaaatttcactccccaccaatacacttggttggcagggataagatattgcgaatcgggtcatgctcatgaatattcacaccttttaaaatctaacggtttcccattgtttaacaaaaccgtataattcttcccattagcagatttttcaataaggcagatgggaatacctaaatgaacgcgaaggcactcttccacgtcctttcacaagaatagaatctcgagtaatctctactatggagtatgcattttgcgcttccgtctctatcatgccttcctgtgtaatcatcgggattccttcgtaatagccaaatgccccggcatgatgatgtcctgaaaacacagcttttacacatggatattttgaaatcgtattcagaatctccatattgtttaaagccgtaaattcactctgcggataaagtggatgatgtgtaaagatcagtacattgttatgatttctttcacattttcccaacaagtcatccagccatttcatctgctttctgctgattcctccattccatctgtaggcttgttttcctcctgttcgttttatttgctccagcatctcagccaattcctgttctttttcagttcccgttacattagcataagctgacacttcattggtgttcaacatgatgaaaacccaattttgcttcttgaacgaataatattcggaaggcatactcaactgtcgatagagaacagaattatctgtcacttctttataatcatggttacccgtaatatgataaatctcattattaagatgagcgagagaggacattatcttttttaaatcactgttctttctgtcaataatatcccccagattaatagtaaactgaacattctgctgattgaaataattgatgcaagtatccagcttccgcaatgcccgcctataaaatcgtgcattttccgaggtgcagtctgcatactgcgtatcggcaaatagcccaaatttaaggataggagaaatatcctgcgctaatgcactgcctcccagaaagaacaagcatgtaaatagtctgataaacattttcatggtaattcattttatagttataaacaaaacgaagaatctgtatacataaacttgaatgcttacagattcttctacttgttcagtatgagaatacaatcaggaaattcctacatttataatctcattatttaaaacctattgattcaattgattatttctgagttactcaatactcctttatacaattcaaattcagaagaacatgatgtcaatatcatcgtctccagtaataaaccaaataacatctttaactctttcataaacatatatttttaattccaccccggattgttaggtttcagatccggattcctttcaatttctactcccggtacgggccacaacaaatctttctctgtgaacacgcgagtaaccagtctccgtccggttattccgtatacatctcccggcaatacctccaaggcaataccccagcgacgaagatcgaaccagcgatgtccttctgcaataagctcaacggctctttcgtgtttgatacgtgtcaatacctcttctttagaagaagctttcagccatgcagggccactgttaataacaggcatattagtagaagggcgttggcgcactttattaatatattctactgccgtagcttggtcattcaactcattcttgcactctgcatacattaggtacacatctgctagacggagtatcggaaagttaataggagtatgttctctattatttatctctccattcatattaccttcgggtacaaatttccggaaaatgtacgactctgttctagcaggactcaatcgaataaagccgtttgtttcattcggagctatgtttcgggcaattataaactcacaagtcttaggctgattgtttacccatcccggataagtagtataaggcataatgatggtttcactcattctcgggtcacgtttcgaatacatttcaagtaacttatctttgtattcgggataagacgcaaccgttttacctccttctgcaagtaccgatacaaaggttttatccttcacgtccgtactgctgaatcctggaataacttcttcccaatcaaaaggtttgccatctttatactcgtacatgcctaccagcgtggcggacggtagcacgacattccagcaactgccatacgtagcacggctgcccatatagaaagtcattggcataccataatctttgcctacacctcctgagttctgaatagcgaaaatcatttcatcactttgatcgccttccggagtgaataacttagcataatcagcatacaaagagtaattatatcctttgcccgacggatccaatataatttcctcgaaatccttggcagcttttgcatactcttttgtatataaatatacttttccacgcaatgcataagcggctcccaatgtcacgcgtccatagtcatcttgtatcctttttacaggaagattgctattgactgcggcatccaggtcagcaagaatgaactgtacgacttgctcttcagagcttctgggcttcttcaagtcattatagtctgtactcaagttcacactttcgtcatacagtggcaatgctccataaaaattataaagttcgaaataatacaaggcacgcaaaaatctagcttctgccaaatactgggttttaagttcttcactcatactttctatcccaggtaccttctgtagcaccagattggctctcatcaccccgtcgtaaagggacttccatttatcttccactaaggcatgccggtcactataagtacctaagataaccggtccgaacccctgagcatcgtaccccacacctatatccgacatacaatcataggcaaatctcattccaaaagcattatcttctctgagagctgcatatactcccatcattccttgtttggcatgagtttctgtttgccagaagatcccatcgcttatttgatcagccggatacctgtccagatcataacaactattcaagcacattgatgcaacaaacgcacctaatattattctatactttttcataaaacatcaatttaaaatgaaagattaactccaataacagcttgtctcatggaaggatagtcaacaccagatacttccggatccagaccatcgtatttagtgaacgtaaaaaaattctctaagctaccgtagattctcacacgctctataggtagagatggaaatgccgttctcgtaaaggtgtatcctaactggatattcttaattttaaggaatgatctgttctgaatccagaagtcactaatcaatgtattcctgttatcactgaattccagtaggcggggatagcgggctgagccctgaatgccttcataccaacggccatctgctatcttcttgttgagctgataactgtggcgaacaaccggacgaaaataattatccagccaataagtttccactccggtgactccctgcaaaagaacagagaaatcgaaacctttataagcccctcccaagttcacaccaaaagtacacttcggagtggctccattaccgataatcgtacggtcatcatcattaatcacaccgtcaccattcaaatctttatatagtaagtctcccagttccgggcgattagaaggaaatgtttttttaggcttgcctgtacttggatcaatcggagtattatccactaactgctgcacaaagtccaaatcctgctgtgtctgcacaatgcgatcaacaacatagccatactgaacatttatcgaataaccttctttaatcatatcagcattagttatagcactttcattacccttgaacttggttaccttgttatttataaaagtgatattaccattcacgaaataagagaaatcctttatcttatcttgccagcccaaactaatttccacacctttgttcaccactatgcctgcattttgtcttgggatagttgcattcccgttcacaagcggagccggaagatcgatcaggatatcttccgtctttttatgaaaatattcgaccgtaccggtaaaacggttatttgccaaaccgaaatccacccctacattaaagattttcgtcttttcccaagtcaggtttccattaggaatagcctgcatagctactccggtagctatattattatttaggatatagttggatgccgaatataaagattgggcatcataattaccttcaatatctgcatttttacttctcaacgcattgttacccaacacgccatacgaagcacgcagtttcagattactcaacgtcaatctttctgaaaaatctttcacgaaaggttcttcactgattctccaggcagctgaagctgaagggaaatatccccaacgattaccctccataaaacgggaagaaccatcggcgcggagattcacttcaaacagatatttgttatcccagttcaatttcagtcgactgaagtaagaacgcatcacccattccaccgcattacctgaagacgaagctgctccggtagcgccatcaatcactcccagtcccggatccagtaagtcctgcttggttgtcttgaaccatttatagcggaacagttcctgactggctcccaccataacgctatagtccagtttggaaaccttattctgataagcagccgtcacatccatcagatagtcattccatttgtaatcactgttcatgatgtgagttttaccaatgccagtagaagccaccacatcgttcaggaaattccattgctccagaaataccggtttagaatcatccgtcttattacgatgcatatagttgaatgatccagtcagcgtaaatcctttgaaaggagtcaatgttccgtaaaaacggcttttcacataccgttcttggatatctcccgcagtattatataaacgataaataggattattggctgcattctgagcatcgtcttggtcattatttacagaacccaaccgaccatcaggagcgcgaaacaccatacccggagaagtagcggcagcgtaagtgaagacatcttccatcttattcgtaccctgctccgtaaaagatacatatccattaatattagttcctatcttcaaccaggaagttacatctatgtccaaattaacgcgggcctgcgtctttttataaccggaattatccatcacacctggtgagtgcaggaaaccaaaagaggtataaaacttaactttatccgaaccaccgctgattgaaacactatggttgttactcaaagatgttttaaacaactcatccatcaggtttgtattcggatatttcaacgcatcctttccttcattagcacgccacaacttgatagcatcatccgagtatttggtcggtaagtttgaattggaaaaaccttcattaatcaattccatataattagcatagttagacactaaatcaaaggtttttcctacagattcccaagagagatagccattgtaatcaacttttgtcttaccctgcttgccactgcgtgtagtaatcaaaatgacaccattagctgctctcgaaccataaatagctgctgatgcagcatctttcaaaaccgatagattctcaatatcctgaggttgcacgctgtttaatgaaccttctactccatcaataatgacaagtggcgctgaattattcagggttccttgaccacgaatcattatagacgctgtattatcacccggtttatttgaactggaagtaacctgcacaccggcagccatacccgccaatccctgtgatacatctgtaatcggacgactttcgctcatttccgccatattgatattggcgacagagcccgtcaggtttaccttcttttcagaaccatatcctacaactacgacttcatccagtgactgcgcatcttccgtcaaagcaattttcagttccgtagtattgccggtaattttaacttctttagtcagatatccaatataagaaatctgaataacactgccgacctgtacattgtcaagcgtgaaatttccatcaatatctgtaatgactccattacttgtaccttttataattacattagcaccgataatagattcaccctgtacatccaatactttgcctttaatcattttttgttgtgtgatactctctactatatcaatatggggtgacgttgaaccgattcctgtcgcccataatgatccggtagcaattaaagctagcgatgctcccaacaacattcttttggagagagagctacaatgtttgagttttcttttcataaatatttaaagattagttgttattaacgctgcaagtttacgcctttccaccctacaaacatcatccaaatcgtccaaagaaacaatgaaaattgtccgtggacatttttaataggattcaggaaaattttcacagatatacatgtcattcctattccaatgtcacatctttataaaaatcattcccgacaataatcacatatattccgtacaatactgcaatcccgttctatttaatagtactaatattgcagcgataatattgcaatgactcaaactaatcaccaaaaataaatattatgagaaaactttcatctttattactcttgatggtcctatccatctgctggagctatgcgcaacaagctaaatatgtattctactttattggcgacggaatgggcgtcaaccaagtgcaaggtacagaaatctatcgggcagaactggaaggaaaaatgggaattgcccccttactatttactcagttcccctattctaccgttgcaattaccaattctgccacaaacagggttacagactcggctgccgcaggtacagcacttgcctccggtcgtaagaccaaaaacagcgctattggtgtattggaggatcaggaaaccccaattaacagtgtagctgtatgggcaaagaataaaggctgccgggtgggcattgccaccagtgtcaccgtcaaccatgcaactcccggagccttttacgcacatgccgctaaacgtaccctttatcacgagattgggaaagacttatataagaccggcttcgatttctatgccggttctgatttccgggatgcaacggacaagaacaatcccacggctgaaaacttatatgaaatggccggtcaaaacggatataccatcgcacgcggctataaggattatctgaaacagagcaagaaagctgataagatgatcctgctgcaaacagaagaagcctctaaacgtgaaattgcagccattccttatgccattgaccgtaagaagggagatatgactcttcaggatatcactcgttccgccatcaatttcttgtcgaaagattcatccaaaggctttttcctgatggtggaaggaggaagaatcgactgggcctgccacagcaatgatgccgcaaccacatttcacgaagtgatagacttcgataatgccatcaagatagcttatgagttttattcgcaacatccggatgaaacactgatagttgtcacagccgatcacgaaaccggaggctttgcactgggcacaggcacttacgacctgaatctacaggtattgaaaaaccaaaaagtcagcgaaaacggcttcacccgcatcgtcaacaaaatgcgcgccaagaccagcaatcaagtgagttgggaagccatccgagaggccttgaaggacaatttcggtttctgggataagatagaactaactgccgagcaggaagcccgattgaaaacggttcatgaaaaaagcctgatgcatcaggagatgaagctggaaaagagcgaatatgcacaagacgaaccgatagcatcggaagctaaacgtatcatcaatgaaatagctcttgtaagctggaccagcggaggacattcagccggttatgttccagtatttgccattggagccggagcagatctgtttcaaggccgtatagacaacacagagatacctacaaaaatcgctcaggctgccggataccctatagatttctaaatgattatgaatttatcttgggcgcggattacgtgtaatccgtgcctaaacctccgaatcttttcttttctgataactctgtggcgtacatccgtactgatttttgaaacaacggctgaaatacaccggcgaactgaatccacagcgatcgcttacctccgcaatcggcaaatcagaatatcggcgaagaagagttgcagcatgtttcaagcggtaattgagcacaaagttattaggagtcatgcccgtcaaagctttaaatttggaatacagcaaagagcgacctataccaacttccttacacaattccggtatatcaaaatcaggatcatcaatatgtttctcaataatttgtgacgttttgcgcaacatctcctgatccagcgggttaatactggtcaaatcaatttccgacagaggtttcttacgaagctgatgttgtatcaacaatctgttccttaccagattattagctcttgccaaaagtaactgtgcattgaaaggtttgcttatatagtcatccgccccacgattcaacccctcaatactctgctccgtattgttgagcgcagtaagcagaataataggaatatggcacaaatcaacattattctttatttgcaggcacatttcaattccagtcatttcaggcatcataatatctgatataatcagattcggcttatgctcgtaggcttgagcaagcccttcttttccattatttgccaggtagacttgatagaaaggttcaaaaagctgtttcaagatttgcagcagttctttattgtcttccaccaacaagagtttcctgtcgttctcctttgccgtttcctgcgatagtgagtctacaggaacttcataaaaagaggctattttctcgcctaacaatggtcctgtagtagtcatcatatcagatacactatcaacaaactgaatatgttcgtcttcctgatagatactcatgttaagcgataaagcaattgtaaaagtgcaacccttccctacctcactttctacagaaattgccccatgatgtttttctacgatgcttttggtcaaagccaaaccgatgcccgtacctagagattgttcgtttcccttctgattcccgccctgataaaagcggtcgaaaatatgagcggaatccaaatctgagatgccactaccggtatcgcaaatctgtatcttcacattaccgttatcagtggcaattatcatacctattttccctccgtcaggggtatatttaaaggcatttgaaagcaaattaaaaaatactttctccaattgcttagcatcaaaccagcacactatctccaccggattgcactgaaaatcatagcaaatgttacgttgatgtgcaaagtcactgaacgaaagaaatatctctttcaggaatttccctatatcccgcttctctatttgcaatataaagcggttctgggtaaatcgtctgaagtccaaaagttcagaaaccaaattagtcatctgctgtgcactctgctttattttcaatatcttgttgtatacttgcggaggaagcagctgattctgcaacaaagtatcaatatggctgacaatcagtgtcaatggagtacggaattcgtgactcacattagtaaaaaataccagcttggcatgattcatttcttctatatgctgtttttcgatacgttctttttccagcgattgtgccaaagcctgttttacgaatcggtttcgggcatagtaagtgatgcccgaaacaattgtaatcatatagaatatccatgcccaccaggtggcataccaaggagtggcaatatgaatagccaattgaataggaagctgaccggaagtatacgccatacgtacataaagtgtataatcgcccggatcgaggtttgtatatctggcctccggagtcggagtaaatgtccagactttatccaatccttccaatttatattcaaagccttgctgcgcatatttgttctgataatcagaatgggcaaacttgataagcaggttattgtcctcagtatccagcattagcttcttcataaaaggaagcgctgcagtgagtattttattttcaggcgacggttttatcaaccgattgttaacatgaagagtagagaaataaagagaacttatctctacctgggaagcatgaaattcttcttatttgacttttcaaagttataccttgcttaaaataaagaaatacagtatattacgaaatatatcgtatgctttcattttgattcttctgtaatccagaatactgttgtatatgtgaaacttaaaattttatagctatgaaaaaattaataaagaaacctattgttaacagagaaataatgcgaaactatttctctactatcgggcttatccctacggtgaagtctaaaagatgatgttaataatttaagtgttcagaactgaaaaaagcgatatttggtattgtgccaagtatcgcttttttgttgccttaattatctgtttttgggatagaatctcataattcatattttacgctagtttttataatgatttttgctatatttgaagatggtaatgtgttatttaaagctttatgtttatgagaatccgaatattgcattttatattatttagctgtcttgttattggttgcactagtaaatcttccaaaaagggaatggtaaactttgacagtattcaaatagtaaagccgattgcagaaactattgatgtaccgaatgcagaaactattcatgtgaattatgaaacaccagtgtctattaaatatgtgccagtggtagaagaggaaaaaacagatatttatcaaatagcaacagatataccgccagagtttcccaaagggaataaagcagtgttagattttatctatgataatctgcaatatccaagtgaagcattggaaaagaaaatacaaggaaaagttgtaatacaagctgttatagatgaaagcggttcaataacacaacctaaaatactaaaaagtatatcaccctctttagataaagaagcattacggattgtctcaattatgcctaaatggaaagctggaaaactaaatggagtacccgttaaagttaagatggcatttccagtaatatttaaactacctaatgacgataatgttttaaaaacagatagtgttattaaatcaatagaagaatgaatatgcagtatagcttattataaaattttgaatatatgaaatttaatattatacatattatcatttgcatttttgtatttgtaggatgcacacagcaaacagtaaataattcagttgaatgttttactatcaaagaatccggttcaagtcttgtatattgtagtgacacattaaaatcaaaaatccagatggaaataataaaaggacattatactgtagaaactaaagaagtttttgctattgtatcaaatccgaaacatctttctttgggctatgattcagcttggaacttggaaaaatgggaaaatagccaatggataatacttgacaagaaaaaacatactaattattttgcagaattgccttttcttgctgcttactactattgttttagttttcctattgaatattatcctataacaaaaggtaagtatcgtataactaaatccttatgggataaggatagagaaattaagttaaatgccatgtttgaaatcaactgaatagaatagatataataaaagccaacttatccgttgtttgaagtgcatacttcaaatgggtaggttggctttttgcattagttatagtttcactagactattcccatttgaaagtataaattgtggtttccgtccttgtatcatcaatgtctaagcgtttgtaggtagatacctcagtacagctttccacatatccgtctttatcaaatgtataggtatattgttctgtttcttcgttgtattcatctttactatatactttgtctggaagctggttgcatctcattcctgccaattcgggatgtgcttctaataacggacgcaaatcatccacactccataccattatcgggagatagcctttacaagtttttccgctataagacaattcgtgaatatcttcatcgctaaagctccatgccattttagttaatttttcaccttgccatgtgtaagacagatagtcctcttcgtcatattgcaattttactagctgattgtttgcattataagtaaagtctgtattatctaaatctcctccgtcactatcagaagtatgtgttatcaatccattttctaatgtatatgtgattgcctctccatttctgctttcaatgattttgtttgctccccaagtgactgtataagtactggtgtgtgtactaccatcgtatcgttctgtgtttgtagctgatactagcttaccattgctatcgtaggaatattcagtaatagatacctcatcttcgtatgtcattcttaattcaacaagttgtttttgattggtaatcacaccatcatcatttttactaggttcatcatcactgcaagaagtgaaattcatgctcattactacggctaataaagccattccaattaatctaaaagttttcatttctgtttgatatttaagttattaattatgttgattaaatcactggatattatttatagcgtctaagtattctgcttcttaatctaatatcaattatcatagcaatgatactaaaaagtaatattgaagaacagaatgtaaaaagcatatctataaaacttctaaggctatgtgttggaggataataaataataaacagaactgtatatatcacgaatatactccctgcaattatgccgaattttaagtaatagttacaactcttcaaaatttcctcttctcgttcttcctcttttcttcgtcttttctggtctatctgaaattctcttctttctttttgtttggtttcttgttgtttcaacaagattcttttttcttgctgcctttcttctatacttctacgctctttgttctcaaaataggcggtaagctcttttagtgattttggatgaaagaagttgctttgattttcttctatcataaagacaaacctctctgttccatcttgttgcaaggcaaatataacatcatccttgaatgatggatgaagcatataagattgttctttgaaagaaattactaaggaattgttcgcagaaatatattgccacgtagcatttataacactaccatttacagaggtaattagagagccgttttcttgaaagatatataactccttatctccagaatcattaaatatcaaccaagacttattacatagaatagtcttaacatccagatttttactgaatctgttgtatctgttaggaatatccaataagtaggctttcatcttgtttaaatccatgcttcccagtttccagatagaagcggataaaaataaggcgtggaaactttaacttattattccacttaggctctggactgccctgactgtataataagcaaagtccacgcctaatgatatgatattcctatagctaggatataaaataccatagacgcagacgcttcttgctcattatccacagtcaagaattgtccagattcaagtgaaggataactttgctaaacgcccttttactaaaatatgtccttccagtgtcttaacacattaagacctctgaaattgctgcaaagttaatgaaaggttttgaatagctaaagataaaacactgataaatgcagttccaagtgttccaaaacatatctgtagtaagtaattagctagtatcagcttcttttagttgtagcttcattgcggtgtaaaaattagaggtgggcatataagacggaactcatacttactgttagctagaaagattatagctaatattgcagattggcacgaccattcaaaccttattagtagttcccaaaaatcacacataccataaactacaagccgtaccatgcctttttaaaaagacagttttcacttcatttcggaactggattgcataggactatcagaatgtgacaaaactttctatttctgtaaatggttcagaaatttcaaactttgtcacattccaatagattagaaacttagacagtcataagtatttagtagttcttcctgccttaaacctaaatatcttttagtaatggttacactggaatgattaaacagttccataagtttaactaaggctagttctgaattatcactattcatattataaacttgtctgccaaaagtctttctaagtgaatgacagctaaagttcttaatctttaatttgtacttctttttcacctcttttagtatcacattgattctttggatagtgaaaacagttcctttttggctcactaaaataggtgagttaatccctattggctttatctgttcataacattctttaatgtgctgcccaagttgggcatttatcctaatagttctcaccttatttgtctttttctctattactgtaaattcactggtatttaatatctgtttccatctcaaagctagaatatcagatattcttaaacctgtgaaacaccctaaagctataagaagtgaaattttgtaattcccatctttagccaattttcttattaaattcattgcatcagaccaaactaaataatctgctgtagtgcttgaatattttaaactcataatgttctgttttatatgtaaataaataaaagtgaatgtttcaccattaccaatatactagccaattagctaacatgttgatttatagcaaaacattcactttgtatattagtgagtatttatgattgtatataaataaagatggataaaatcagtatcagcaaaaagggatttataataccaattattattagtaacagtactactagtatgctccatagtactagtttttcattatcattcattttgtagtatttttaagtgaataaaaaaaggacacctaataaatagatgccctattagttagtttagcccaagaaccaagaatatttattatccagtccttgtaatacattgtttaatccaacacttacctctgtagcatttaccccacgttgtaaataagcgtccacataactcatcttatttgcttgggtgagtaaattatgaaaatcaaaaagagatatagcattatctttcactccaaacacttcatttgtgtaataatcacgacacacactatttatttggctgtcagtgattaaaagtcttggtattgctttctgtcttgctggtgaaagtgcttgatacattctcattctgcctaccacttgtgcaaactgtgtttcagatagataagtgtctgataatgtttgcatcaaatgtatttctttggctgcattgaagctgttaaacaattccagtacatttctgtaaagctcattgatattggttacttccatgttgaatctcacaccctcaccagtaagaatttgattagaacaaattttcattctccaacctataaaacaagaaaatttctccaagcctttggaagaacggtacagattcaagtcactgtaatttcttaccccacctatgcacaattcaagtttttgccctcttattgtttcaaaaatagttggaacagtaaaagcaaatgcaagcctttgatagaattgtgtcttttcacattctaacagttcacttgctttcttgcctagtgcggacggtattctaccacgtactatatgtgaaactcttatttctggaaagctcatcttttcacctgcatagaatgtacttgcagcttcatgcacacaagaaataaagtcttggtgtgcaatggttaattcttggtttgcccaagtaggcacaacacatttgtttgcaagttcttccagtgtgatagaatctgtatttgcttccaaaaaggtaacactaggctttgcagtttcttccacaattatagtggcttcttctgcatactcacctaaattcaaagttcttttctctgttggcatgataactaaatttctcatattgataaaagtttaaatgattaataattcttttttatatcaatatacagaggggggactaatcgggttgtagaccgtcgctacagccactcttatatattttaggtcactggctgaatggggagggggacttctgtattaagtaccttatatatctgttctcttgatttttagctaaactgcatataggtgattctttaatcaggtagtctttttaatatcattggctgtatgtggaatattataaagtataggctatataactctaataaaaaacgaaagttggattccgccatattgcaggtttcctccaactttctttctctgccgttacttgcgccatatcaaagcgttgtctttcacgttcacattggcaaacgatttcagttccgcaatgagttgctggacttcttcttgggtaggctctggcagcttgaccctccctttgctctcctttccgatattcaccaacttggggctgcatcttctgataaaagacaccatttcttcatggtcaaactgcatcaaaggttctgccgttatcattgtggggcgtccaagccttgctatctcttccatagcttccacccgttcctcaattcttggagctttgttcattatctccggatagaaacggttggtttcaatggtcgtgcagaatattacacgttccataatcggatggtcgatgaactccaaaaacctcttggggttcttggactgtaatagataagcgttgggggcttccgcattatgattctgataacaataatccaaaattcgtactatccattcagacggaacatcttccgcaaacgcatctgtagaactaccaatgaaaatacggtttccatttcccaagtctgttttaaactcattctctgccaataagaggtgctgatactgtggtattgttttcatgtaacaatagctgcaatcgtgcaggcatttgcctttgatgggattccaagtataatcaataaacttatacatatccccatttttgatatttaagctcataattatatagatttaaatgtttatatgtgttatctacttaattatttatgtagttcatatcctttatatttcttcccattaatacgttttgatacaaggatagaattaacataatatctcgttatatctgtagcttttgccgttttcttcaaccccagcttattataaatatcctgtaagataaattttagttttgaacattctataaacgtattgatattaagtttatccagttcatgtattactttactgtcattgttcttgttctttatctcattcttcaaattgctttctttataacttaatgacttgattcgtttgcttccaagcatatcataataatgctttatgttaatatctttttgttctatatagaaaatagcaaaactatatttattctattttgcttcacaatatgatttcatcaagtcctcaaaactttcattacctgttattatatccaactgtttggttactgcactaaatttctgattccctaaagtctgcaaatttcttgtttcattaattgatttctttacagcaataccgtcttgataattattcctttgcgtatcataaacaaatatatcattgaggtatgccattttattaaatgcgaactttgttccagtataataggtatagctgtcttcaaatttcattatggatatatttcgtctgttatctctgataagtttttcctttaactctttaggagcattgttataactctctatctcctataatgtaacagtagttttagtatctatcatattattaaattcaatatcatcaagttcttccctgtttgtattataaataaagtatatataatatctaaacgggttgtccgcatttcttagtcttcctgctatttgaaccagttctgtacttatatccacagtggtatttatcttgttacagtcacttatgacgaatgtaagtgcattaccagaatacatatccactccaaaataggcagtggaagtgcataacgtgataagtttgggcttttcatcttttagcggtattctgcctatatcaaaaccatttcccaagctctttttaattttagtcctgttgtcttcattttcagcacatataatattgacatcattactttgtagttttgttgtcttgactaatgaaatgatgttgtttactgaattaaggtatatgacggcttccctgcttgtttcacctgtttccaatgccggaaaattacctttctgatacatttctattatttcaattcccttgtttataggcttattcacctttcttctgaacacattgaccttatatgtatcagtgaacttgcattcataataaggcatatcttttagtatatccatctgacttatatatttattcagtaatggtgtggcagacataaaagtaatattcttaatccctgtaagcccatgcagaaaattcatctccgtaacagacttcaaactgctgtctgttaatacgcattgaaattcatccactactatatgccagttatctatatctgttataatatccaataccttatacaagctatcataggtaactaatattttgggtatatcaatattattaatgtagttgactatttcggacttattaattccgccaataaccaacatagtgttaggatattgcccatgtttgtttttaagtaatgttattctgggactgcatataatcgtctttctgttatcctccaaggctatagtagtaccaccacatcctgtaagtaccttgttaaatatgccattgggcaaactaaacttgtctttaatcagtattccgtttaatttatattctgtcacttcattgaggtaggtaatcccctctccaaattctattatattcttcattgatattcatttttagctttctatagaaatatcacctttatgatacatttatagaaaaatgttccacttttgttatcttggactatgatttatcatctttattacttcataccatctatttctttatatgctagctttttatatacctgtcatataatttattctaaggaaagctcggtgaaaaaaagttccacctaaaaataaaaaatatgctatcatttatagatagcactcatttaatattgccaatcttgaaatatagtgtaatacgctacttgttcatctgcttctttttctttagaaagcctttcattttagcccatataccgatagtcaccttgttgccggtaatgccctcactaaaagccatctgttttaactcttcaaaggtgtaatacttcataattgaattgttttaagttagtttcattatatactgtaaaatctatggtgtttgagttactttatgtaattctggttatacccctgctcgtggtaattccaatctttttatctctgtacgattatactcacctctgggcggtgtacctaatcaaaggggcactttctatagccagcttacctatatcgccatattgccgttattttcttctgtcagtaagctaacagataaggatggtgactttaagaacttcttttgacaatagtttatatttatggctattgacgaataggcaatattcggaacagatagttaaatggttgtatattagcgactagtagatataccgaagtaggtactatataacttacctagtagataaaaaaggcagtcaattatcctgctgcccttgtgaaccagtggaatactgattcaaacaatataatgcaaaaagcctgtcggaaattttccaacaggcttttatgaatatacggtttaccgttttatgagtgatagagtaaattgaaatctatcctatcccctgtgagagaacaatatatttgtgggttaagtgccctcccaccagttagatgttctagttcatccacgaactgcccactttcacatatcttgtcacatatctgctgtaccagacctatagtcaaagggaatagcttacagctagtcagatagacattatttattacccctttgtcagttcgcaatctcttggcttcttctttcaaattccgtaccaacaaacttttaatactttcaaataagccttcaatacctattaaagtttccatatcctttttgttgggctacccagtgaagaactctcttcaactttcgtccctatctcctgtaagacggtgcaaaggtaaacaatattttgaatcggacaatatttaatattctgattatcaaataattacaagtgtgttaaaagagaacgattttcaacacaccaatcttaaacacttaaaaatgggtctgttccgtattagccataaatgacaccaatggtagtatatttataattttcatatcttctaataaggtttttcaagaagttcctcttttcattagtggcaaggtcgcattcttgatagaatctttcatcatctgatagtcccaatatctttatcattctggaaataagcaacattttgtctatagacttggggtaaggtggcattgctgtgtaaggagttaaaaaaaacttcatcattttagtgaacaaagcatacatgggagttttgtctatggtaactttttcatttagcattttctttaagtcaagttgccctctgttgagtccgttgttctccataagttttttatatacgactaaggctactccgatttccttaattgtaggtttgtctgctatgacatatttttgtttcccctctagtttgaagattaattcggcatttttttcattgggcatttcatttattctacctaccaattcttgaatccgttcattagatgtttcagcaggcatggcatcaacgcatttatccagtaccacatcttttataaaaagtgctagataccagaatttgctaatatctatatgatatgagtttaatacgtccaagatttcttctgatttcagatattcattcttgaaacggacatctaaaggtctatatctattttttgattgtgagtattgttcaaaggttgtattacacatacccatctctttggctctcttatatttttcttcaatagtcagatttctttcaaaatatctattggagaatatagcaggtgcggaagattctacgggtatcattcccttatctgtttcttcataactaggcaggaagtggttggctacttcccacacatactctaatagtggctcatttagggatttgcagctttcagtccaatttactttcaaatctggaagttcctctatctgatatagtttttcttctggcatggtacattcattattagttatattgcaaaataacagaaaagtctgcaaattatggactttctttatattttccattcttccagattgaaactttcctgcaactgtttaaatgtgtattctttctcttttatacgttccaagacaaaagaagtcattctaggttgctctggtaaagttggaactattacagtacgttttaccttgttgaatctgaaagtaataggaagtgcccataaaaaaggcttgtttctgttatgatacacaatgatagtttccaagtcattcttataagtaatgactatgaatccgctatttaaagaaacggaataatagactactttactaagtaactctctgaacatttctcccttgccctccagagaaaggctgtcaagttcttttctggactggctctttatttcatccgctattcttctgttattggatgcaatttcttcatcaatggctttcttttccgcttctatactctttatctggctgtctattgaatccgccttgccattcaatgccttgactattgcgatattggtggaagccataacattgtctatgactgttttcaaatcagactgtagtttggctatttcagaatccttttcttttatgctttgtgtcagttttatattttcagcttctatttctgctattttctcattgctcttggcttggtaagtttcatccagagttctaagtctggcatctttccacaccgcatatattaaagtttcagcctttatgccaacattggtacatgagctttttattcccatctttattctgtcaagacatctataggtgatgcaggatgaggttctgccatacattgaggtttgtccacaaggacacttgataatacctttcaacgggttataatgtttttgtgcctcaccgctataattcttgttctcctgcactttcttgtgtgccagattccagatttcatctgatacgaattttacgggaagtttcagtttcatgcctttccaatatctgacaccgttataaatggaatcatttataattgttctgatagactgttcatagaacggtttgtttcttgctgtcctatatccaagcatattcagtttttctgccgtttttcctagagaaagaccgtttgccacatagttaaatatatctctgactaactgcatacgttcctcatcttccaccaatagcatttttggggttgctccctttatataattcggattgggcactgccttaaagccagttggtatattactgtctgtaagcattaacggaaacgcttgtactttactgtctttacctgtagtcatacggcttactattttctttctttcatccgctgctccataggctttgattgccagcattaaaaaatcagaaagaatgatagtttttcctgcttcatatactttgtctggttcgtccagtattactaaatccacgtttctaatgattgtgtgaatctgtgtcaaagtttcaaatatatcatcttgacgtgacagtctagacaactcactaactactaccatgtcagcaacgctattggtaatgtttagaatactgttcaatccgtttctgttgctgactgttccagatatggcatagtcttcttctattcttaacagagagtaccccttattctcacaatattttctaatcaacactctttgtctttctaggtcttgattatcagtagaaacacgaatgtaacctataactcttttcattgtttatcttatctttgatgcaaagataaagagtattttcaatagcagggtataactttgaaaacttaacattctgccaaaagagtaacccctttggtatctccaatatagattttattgtccgaagagacataaatcccgcaatcccgaatgatcggagccttgagatagacttctttctgtcccaagctggtaaatgactgctctttcggatcaaaaagtatgattccccggtctccggtaaggataaacttattgctggcagtctgtttcacattgtagcaataattgctgggcaatgtgctgttctccgtattataaacaatcattttcttgatattccggtcgtaaaacagcaatccgcttcctaacgtacagatatatgcaccgtctttcgtcacccgtacatgcgatatgctgcccttatagcccatatcctgcagtttgagagtacttctttgagtaacatcagaaagagggacgatcacaactttgtctgcttggttagcatagaagtttccttctgcatcaatatcaaaatttatacagtaagactccggtttgaacagaaacgtaaagtgattagtcaccggatcgagttgaaaaacaccttcacgggaagaaagataaagtttaccattccacatcttgacctgatagatgaaatggcgcggagccggagtattttccaactgatgttccaggtaattataaaagctttttttctgaaaatcataacgtgacaatcctcctaagtgggttccgatatacagatagtcattctcttggtcatagcagatactctttacattgttatgcggaatagagttcagtccccctgccgtaaattgatgtaccagttcccagttttcatttatgcaacctaaacctcctccgtcagtactgacccaaagatttccatgtttatcagccgtcatctcaccaatgtatgaataatataggttggaaagatttccggcctggtagtcataatgtacaaatccactgcggtcgggagtaaaatagttcactcctccatagaaactaccgatccagatagttccctgccgatcggtgtaaagagaaaaaatagaaggatgattcaagccccccacatactgaggtatctgtatcagtgtataggtttgcttccggacatcatacttttgtaaaccaacgaaagttccaaaccaaatattatgctcatcatcctcgacaaaggcacgtatctgcatattgcggattccagcacttccggtaagtgcataaggaactttttgcaatacattatccttgagccgatacaatccttgcatgcgagtgcctatccacacttcttcgtccgaactctcgaaaatacaatatacatctatattttccagtaaaaaccgggatggctggagtgtgttttgaggaatgatatacattccttccatcatgccgacatatatattggtttcgctaattgccagcgtgtttacggtataaggaggaagtttcactttcgaccgggcggtatgctgtcggcaatcgtaagcgaaaagagaatctttccgggcataccatatttcattctgatagacagccaaagcagtagtagcattgtctgtcgtatattgcttaaatgtggaggtatgaatgtcatagccaaacaaattattatcagctatgaagaaaatatcgccatcgatatcatgaacaatgaaaggtacataattaccaatccaaagcttttccccatccgcatttgtaatttcgcccttgacataagtaatttgctctccatcatacatattaatgccttcctgcgttccaaaccacattcgccccaatccatcctgggcaatactcaaaaccgaaggttgtgatagtccattttgtaagcccaaattacggaaatattcggcagttgccggaagtgtgctaaatagcaaaagaaatagagatatgattctgtttttcattagtatggtttccgcattttattatgaatgcaaaaataaggaaaaaagaatatagctcctactaaaacaaagtttattgttgaaagaactgcccccaaaagttagacacagaactttaggaatgcagttcatatccaacttttgaggaacttcatgtttctcttgtaagctatacccttatttgaaaagtaactgtgccatgtgatacaaactcctgcgccaagtcaggaattcatgggccgtatcgggagaaacgaaagacgttgccttaaaaccggctgccttgaggtcattcacggctttagtcacaccatccggattctccttgcttccgcaactgatgaaaatggatgccacctgattcttatccttgatatcgcccggtgcataggtaccaccgctcagtaacccgtaataattgaatacttccggacgacgcaaggttatcagtttcgtttcaaaaccacccatagaaagtcccgccattgcacggtgcttcttgtcggcctgtgtacggaagttactatcaatataagggatcagttcgtccaccagcaccgtttcaaactccttggccgtaaactcattgatatgtccgaatttcacatcattcgtcatgccatacgtcattacgatgatgaacggttcaatcttgccttcggcaatcagattgtccataatcagattcgcatacccctgattggaccatgccgtctcatcttctccccatccatgctgtaaatagagaaccggatatttcttcttatcctttccgtaagtgggcggtgtataaacaaatgcacgacgatgggtatctgtgctcttggaataaaaataaacctgttgaacatttccatgaggcacttgcttcatagcatagaaatcctcatcatgagccggaatttcaataccactttcccatcggcaagagccgtaataattcttagtacccggatcattaaacacaccaccatcgatagtcaggtgataataatggaatccctcatccatggggccatctgtagtacctacccatacaccttctttatctttgcggagaactgtgccaccacgaccgcctaatccaagactgacaatgactgatttggcatcaggagcaactacacggaagcgggcgtatccttgcgaattgaccataggatattgctgtccgggctgattaagtacagaaggatggaaatcctctttcactacagcagtatcgcttgccggatcaaaatccttaatgatactatagacacgtttcgccttataattttcatcgtaaggcaacggatagttacgtgcaccgagccatgaatcgcggtcggaaagattccagaaagtaacattgtctaccacatccttatgtttgcgaagtactttaaacaagcgagcatactgatcttcctgaagcgtttttactacctgactgatgttgccgccgtcacgactgaagttgagctgtcctcccatctcctgattggcacgaatatccaactcagtaatatggatatgtttcactatcgtagaatatttcgtcagggcagcatctacatcttccatactcggaccatagacattgtaatgtccctgcatgccaataccatcaatgggcacaccttcttccttcatggatttcaccatattatagatgcgatcgcgttttccaggatcagcagcattatagtcattgtagaaaaggagtacattaggatcggcctcacgggcataaataaaggctttcttaataaactcgtcaccggcaatctgataaagaggggaattgcgatacggacttgggtgttctcccatgcctcgtcggccaccctgccagccaccatcggagattgcttcattcacaacgtcccacgcatatatcacgtctttgtagcgttccacgatagctgtaatgtgatgtttcatattttgaaaaagtttctctttcgacactaaatcccctttttcatctttatacatccattctcctatctgggcatgccacatcagacagtgtccgcgtaacttgattccgttgccacggcaaaaattggcgattttgtcggcattctcccaattgaactgtccgtaggcaggctcggtgggttgcggcttcatgtcgttttctgccgtaatactgttgaagtcttttttaataatggcaatctgttcaggattcgagatgttacgcatattaacagccacgccgatagagaagtaatctttataggcatccttcaaccccgtttctccgctttgtgcgaatccggtatttgcgcccatggtcaatgccaatgcgcaaagggaaaatttgaataaatgtttcatctgataattatttaaaaggttttcatagcatatctatttatctacaatttcatgtatttgtacatgcatatcactctaattggaaacggttacaaaagaatgcttttttcagagagattcttcatatttgtgtaacacgttttttcgcttatgttacctcctttagtgaaagtgtaggaaaatggattctcaaggtcagtaccgccactgaaatgaagagaaaaagatgattgtaaccaaaacgaaacatgcatgacacaaaaatataacacacatgtctgaactttgccgccgtaaattaatcgactacaactaatgattatgaagaaaagcgcattcatgctgctcatcatcctgctgtcgctgacagcaaacgctcagactccgtaccgcaacgaggacggaaagaagattgataaagaagagttggaaacaaaggattacctgccggaaatacacggtactatccgtactaagtttgagtatcagacagaaatggctgccagtcgtttcgaagtacgcaacgcacgcatcagcattaccggaaatgtattgcccatcgtagcttataaggcggaaattgatctctccgatgaaggacaaatcaaaatgctggatgcctacgcccgcctttttcctataaaagacctgaccgtcaccgcaggacaaatgcgagtaccatttacaatcgacgcccaccgctctccacatcagcaatatttcgctaaccgttcgtttattgcgaaacaagttggtaatgtacgtgacgttggcgttacattgggatataaattcggcacaggagtacctgtaaccttagaaggcggactctacaatggttcgggactaactaatcaaaaagaatggcacaaagaggtaaactattccgccaaagcacaattccttttcgccaagaagctgaatctggctttaagcatacagagcatccagccacaagaggtaaggataaactcgtatgatatcggtgctttctatgaattcggacgcttccatattgaaggagagtatttgtacaaaacttatgcagacaatgcctatgacaacgtgcatgccgtaaatagttttatcaattacgacctccctttacgaaaagtattcagcaagatgtcttttctggcacgctatgatatgatgaccagtcaaagcgatggtaaagccattgacgaagagaccggagctttgactaccaccgactacaaacgtcaccgtataaccggaggtatcactttcagtctcagcaaagcattccgcacagacctccggctgaactacgaaaagtatttctacgccaaaaacagtattgccaaagagtctgaacaagataagattgtattggaactgatggttcggttctaacacctcacatgcacctgccaacaacaggtgcatcgtccggtaagtactctttgactctctcattcatcctacttaaaccgtttcaaatccttcttctcaaacacccattccggagtgtagagcttaccttcatcattgtcagacagctcataccaaggcgataatccacggttagcgggattcaccaatatgtgaatctgttgagccggcatatagctctgtgccagcaggaacactttctttcctgtttgagtgtaaatcgccacatccactacaatgactgcgtgccccggtgatccgcctttgataaacacatctccgggttgtaaagatgtataaggaaccgaaacaccaggttttaaatacctccggaagcatctgtgacgtatcaaagccgtacctgctccgtacccgctccgtactttcttcgtgtagaagtacctttgaccgaagaatgtacggagcaagtacagccctgatacggttcgggtacggtgcatatacccaaaagacacatcataacgaaagtatgaattgtataaaaaagagattaacagtcatccttttcatgaccaacaaataatacaaattcaattattttattgaatatacattatctcttcctaaacttttccatacaaaacttgattatttacacgaaaaatcgtatatttgagtaaataactcagagcttatggcaaatccgattcttcctggtatatcagaagctgaacaagaactgttgtacaagaaactaaatgaatacaatcagggaagaacctcttacaaagaggcaggtgcttatctggttgtactgccccgtccggaatctccccgctactccttatgggtgtattctcctcttcccgaacgccagtccattttttacgtccaggacctttctacagacatccatgaaagtctgcgagcggcaagcagcctatgttattattctccacgttgcattctgttggtagaatataatgccaaacgcatgcagagtaagggagacgacattatctctttcggaaagtatcatggacatttcctgcacgaaatcttccgtatcgatccggcatatgtgagttggattgcttataagttcactccacgtatacctaaacaggaacgcttcgtacaaatagcacaggtgtatcattccgtccatctggatattcagaagcggcaggcacatcagaaatattctaccagccgttttctgggaaaagaaggagataaagtgaaagaactgacactgaaagtactccgtgtccggctggaagacgatccttacaaaaccaccgtgaaaggaacgactccttatttctatgtccggcagatactgactttggaagatcctatcggcaacctcgtcactttccggaccaactcgcgtacggcaagccgggaatcgtgccaggtgcccgctacggaacatgccttcgagcccggagaatcggtatatattgcctcggcacgcatctcttgtacctttacttcgggaaacaaacaatacacccgcctcaattatgtcaagtttaaataaacttaaaagatagagcggtattattcctattaaaaacattcgtcctttctttgtcggcagaaaagggggtgctataaaaatagctgagattatacccaatgaacctgatacggttagtaccgtcgaagggaattttctttctatattctactattcgtttatactactatccctttctgtaagtataatttctaaattcagagtttgaatgtttgacgtacaattcattacgcattttacggcatccatatcttattcggactccgcacgcatagcccttgaagggggatgccgctgggttcagcttcggatgaaggatgcttcttcagaagagctgaaagccacagccatgcaagtgcaggaactctgccgtcaatacggagccacgttcatcattgatgaccacgtggaactggtgaaacagattggcgcggacggtgtccacttaggaaaactggatatgccgataaaagaagcaagggaaaggctgggcaaagatttcattattggcggaacagccaacacgttcgaggacatccggcaacatgccgctgatggcgccgactacatcggttgcggtcctttccgcttcacaactaccaaacaaaagttatcacccattctgggactggacggttatcattccatcctgacgcaaatgcgcgaaaaaggaataacaattcctgtcgttgccatcggtggaatcacacgtgaggacatcccatccctgaaagcatcaggactgagcggaatagcattgagcggcggtattctaaaagctgagaatccggtacgtgaaatggaaacaattatacgactgacccaatagaaatcaattagtgaaccatggaagataaaacaaaaattacttatcccgaatccgagaaagtctatatgcaggggcaactccatccttatctgaaagttgggatgcgaaaagtgaatcttacccctaccgtagtagtggaaaacgggaaaaaagttatgacggagaatgcgcccgtctacatatatgatacaagcggcgcatacagtgatccggaacagaaggtagatttaaagaaaggtttgccacgcctccgcgaaccgtggatacaggaacgggatgtagaacggttgacggaaatcagctccgaatatggaaagatgcgtctggcagacaaaagccttgactccctgcgttttgatcatatcactttgccttatcgtgccaaagcaggcaagcagattacacagatgtactatgccaaacagggtatcgtaacaccggaaatggaatatgtagccatccgtgagaatatgaactgccaacagttgggtatagaaacttacatcacaccggagtttgtgcgtgatgaaattgcggcaggacgtgctgccttacccgccaacatcaaccatcccgaagctgaacctatgattatcggttcaaagttcctcgtaaagattaatacgaatatcggaaattcagctacctcttccacgattgaagaagaagtggaaaaggccgtctggagttgcaaatggggtggagatacgctgatggacttatctacaggagaaaatattcacgagacacgggaatggattatccggaattgtcctgttccggtaggtaccgttcccatgtatcaggcgatggagaaagtacacggaaaggcggaaaaccttacctgggaactatttaaagatacactgatcgaacagtgtgaacaaggagtagattattttacaattcactgcggcatccgcctgaagaatattcattatgccaatgaccgcctttgcggaatggtgagccggggaggaagcattatctcccaatggtgtaaaatccatcagaaagagagtttcctgtatgagcatttcgatgatatatgcgatatatgcgcacaatatgatgtggcactttcattaggtgacggtttgcgtccgggagctatccgtgatgcgaacgaccgggcacagtttgcggaactggatacgatgggagaactggtagaacgcgcctgggcaaaaaatgtacaggcattcatcgaaggtccgggacacgtacccatgcataagatcagggaaaatatggaccggcagattgagaaatgccacggagcaccgttctatactctcggtccgctggttacagatattgcaccgggatatgatcacatcacaagtgccattggcgcagcacaaatcggttggtacggaacagcgatgctttgctatgtgacacccaaagaacatcttgcattaccgcagaaagaagatgtacgcataggagtggtaacttacaaaattgccgcacacgccgcagaccttgccaaaggccatccgggtgccgaagtacgtgacgatgccttaggcaaagcccgctatgaattccgctggaaagaccagttcaatctgagtctcgatccggaacgcgccttgcaatattacaaggaagccaaccacctgaacgggaagtattgcaccatgtgcgggcccaacttctgtgccatgcgcatcagccaacgactgaaagattgtgattatgatgcagaaatagaaaatacagagaacgaataactttttaaacttataagaaaatgattgaaacaaaagtatccaaaggtatcatcagtacctattttgaaaaattagagagaaatcttgatctggacgttgccattgtaggtggtggtccatcgggcatagtagccgcttattatctggcaaaggccggattgaaagtagcgcagttcgaccgtaagcttgctcccggcggcggtatgtggggcggtgccatgatgttcaaccagattgtgattcaggaagaagcgattgacattgtaaaggaattcaatatcaaccacgagaaatatgaggacggcttatatgtgatggactctgtagagagtacctctgcattgctttatcatgccgtacatgccggagccaccgtattcaactgctattccgtagaagatgttatcttcaagaataatacggtaagcggagtagtggtaaactggactcctgtattgcgcgaaggtatgcacgtggacccgctgaacatccttgcaaagatagtaatagacggaacaggccatgacagcgaaatagccgctaccgtagcccgcaagaatggcagtcgcctggctaccgaaaccggtggtgtaattggcgaacgttcactggatgtaattgcaggagaggaagaggttgtaaacggtacgaaggaaatctatccgggactttacgtttgcggtatggctgcttccgccgtttcgggcactccgcgtatgggaccgatctttggaggaatgttgatgtccggtaaaaaggtagctgaggaaattatagcgaagctgaagaagtaatttctcagaagctatatttctattatatacaaggcgtatgattcccgcctctacagtgtgattaatacataataaatcgcctgtagagacgggaatctttcgcctttatattatattcttattacgctcctctcttttcttgccatgcagtgttttcttttgccaaaattatcgcttaataataaaattgcataactttgttcccagtgaacatactgataacagtctcgttaattaataattagtacaacatgaaacacattctttttttaataataagcattttattaacctcatgcaggaataacaacatggggagtgatactcaaagcaatgttttacaagcagacttacatccctccaaaatatctgtacatgagattttcgatactattcaagtaataccgttagagacaacggatagctgcctgctacgagctccagtgaaaattgtagtcggtaataaccgtaattatattcttgattggaaaaattttcaagtatttgtattcgatgatagaggacacttcttgcatacaatcggtaaaaaaggacaaggtcccggagagtatagggaagtatatgatatgattgttgatgaaggaaaaaatcaggtaaaactactttctccattcggaagcatctatgtttataacctggaaggtcagtttgtaaggcaaatcagattaccggacaaaagcaattaccaagccatggaagcaatgggagataaaattatgacatggacaattcccaatagctgcgaagaaacctgcatcacaatcgtggatgccaataccggagaagaaacaaacagtttctggaaaggagcgcgcatcctgaattctgtagcagtaggtaatttttatacctacaatgggaagagttattttgcccctacctttcataataatgaagtttatgaaattacggaagatagtctacggttagcttatcaatggaatttcggtaaagacaacattgatatttcaaaatataagtttacttttaccgatgataaccaggctgaagaaggatgccttataacccaatacataaaagataatactataccttatctattaagggcgcagtatcaaaacagcaagttcttttacgttaatttgtcatatggctggtttccgaatctgactttaaaaaacgttttctatcgcaaaatagatgataaatgctttttatttagagaatctaaagaaggcataatagtaaggccggaaacttttgaagaagaatatattgtgcagtttgccttcagcgaggagtttgaagcatatcagtccgtattacctccaacagagtatcagaaattgaggaaccggcaagaagacgataatccctgcctgatcaaattatacttcaaataaaatctcacacgcatttttagagataacccggcatataaaacctattgtaaaccacttcatgtgtactttcaataagaatctacgcaatctttttcagcctcctgaaatgagcaagcaactcttcggcatctttccacgtatggtaacggttccagatatctcctaataaagctgcaccgccaaagccaagagactttatttccgcaaggttcacctcacttattccgcctaaggctactaccttttcatggatgactccgctttcctgtgcttgtttcaactcctcctttgaatatcccgagcgatatccctgtttggaaatgctatcgtaaacaggactcataagcacataattgaaccgggagactgtagtttccacttcttccaagctatgacaggcacgactcagtattccctcataatttgcaggtgcctccggatgacgggaattcaagtgaattcctcctaaaagatacttatcttttaaagagaagaaatcatgaatgacaatccgggttctatattccggagcaataccttgcagcagattttctaccgcatgaacatccgcacccggtttgcgtacatgcagcaagtccagtccggctttaaataactcagtgacgatgcgtgcttcatccggaataaaatccggagaggtgataataatcagtttcatttttctatccttcatttaccggaggcgtcggaaacgggaaatgccacaaaggaccattcccctgccctatacgtaaattcttcccggcttcaatagcacaggaaatgtattctttggcctgttccactgcttcatacaaggatgatccttgcgccagaaaagtggcaatggcggatgaaagcgtacatcccgtaccgtgcaggttggcggaatgaatacgcctgccaccaaagatattcagttcttttccatcataaagtacatcgcacatttcatgaccggtcagatgacctcctttaataagaaaagcacagttatatttttcgaataaccggcatgcggcatcctccatttcatcaatcgtctgaaccggttgttgcaacaatacttctgtttcgtgcagattaggagttacgagagttactttcggaatcaacttagtacgaatggcttccaatgcctcatccgtcatcagactatgcccgctggtagaaaccatcaccggatcgaaaaccactttccggggagaatagcgacgcagtatccgtactatttcataaataatctctacgtttccagtcatacctattttaatggcatccggttgcaagtcttccatcaccgcctgcatctgttggcctaccagctctgccgcaacaggatgaacggcttgcacacccaatgtattctgcactgtaatggctgtgatagcagtagctgcataacctccaagtgccgagatagcttttatatctgcctgtatgcccgcgccaccggaactgtcggaaccggcaacggaaaggacgattgctttcttatccataagccaaattacaactttataacattccctgtacggctactctcccatgccgcctcaatcaggcggataacgccaagcactccgcacgcatcactttgcaacacttcgccattccggatatgctgataaatattctcataaaaagcagcgtagtttccgggaagggtcggataaggtttccgcaccacattaccatctttttccgtatggagtattccccattgggattcatcctcttctccccaatgcggagtatccggcaacacacctttagtcagatccgcctcttgaggatcaagaccatacttcacataagagccttccgttccatgaagaacaaagcgaggctcattctcacacatcagatagctggctttcaaggtgattttcacttccggcatccgggcaggtttcatcagatggatgataaaataatcatctactttaccaccggtacgtaaagttgcaatatcagcaaatacagcttcgggcataccaaatagttgaacagcctggtcgatgacatgggcacccagattataagtcagaccaccaccattctcgccggtttctttccaggtattcggcttgatgaaattccggtagcggggaaaagttgattcaaattcgaccagacggcccaacaatccctgagccaatatttctttcacggtcaggaaatcacaatcccaacgacgattctggtaaacacttaaggtcagttctttttccgcagcaagggctacgagttcttcaccttcctctacagtagtggtgaaaggtttttcaacgataacatgttttccggcttcgagagcacgacgggcatattcgtaatgggaactgtcaggggtattcactaccactaactccagttcttccatccctatcaactcatcaaaactacgcacaatacgggattgcggatacttcgcccgtgacaattctttactacgctcagtgacagcagtcaactcaaaatgaggatttgtggaaataaaaggagcatgaaacacttgtcccgacattccaaaggcagccaatccggttcttatcttatccatatctttcattttttctttcggcaaaactaatgaatttatcgctgatgtaccacacatgaaggaataaggttttacgaagaaagataatttaatccttcggaagctcctttttcagtacaatgagagcctgattcatctccaccgccttgttccatatctgctgcaactgtccataatattcggaaggcacgaccgaggaagacaaaatgaatgtataattcacaatgacgttgttcctgtttctttggattgcatatttgcattgcagcttgccgtcttcagtctttatcacttgcgtgtgggggatttcttccacctcatagccttcaggaagcgtcagcgcacaagagagagtgacttttgacggataagggaactctaccggaaggatccgctccgattgtataaacgggttctttgtcaattgcggaaaaagaatcggattaatatatatatggtcatccgacttttccgcctcaagtacaaaatcaaattcttcctgtatagttgtgaagttatcttccttatctgttagcttcagattagtaaccgtcagtttttctttcatcaattcctgtttattcacaagagagtctttcgcctggttctctttccggtgttctaaagcttgatgtcccttcagaatggtagtccgacgtccggttatcagattctcccgtgcattagcactgattttcatgaaaacttgattggtagatatttcctgcaagttcacccacttttgtttttccggtatatcggcagaaagcatacgtgctttggtcaccgacaattcaatgggcagcacattgagagccggtacctccatcgaactatccagataaacatactttcctcttgcctcatcataaatagccactacgaaagtgttcaatttctgaagagagggaaagttagacggcaacattcccccggaacgccggctcataaccacaggataggccttgatgccgtagcttctgagcatactgataaaaataaaattcaaatcggcattactgccggttccggctttaagtaccttctccagattctcactgtaaagtttatactctccattccaagacaacttttgcttcagcaattggaaaacacctataactttttgattaaaagtcaaattgcccgattggttgagttgccgaatctcttcaaggtacggacttttccacaacaagtgtttaccaaagccttcgttctcctcccgggtcagttgtttatccacatcctcccagttctggctgtaaggtttgtagccttcatccggataattggttccttgcaaatcgaaactaacctgtattctataatcttccggacaccagcaaaaagattcatcctggcggatggcaggcagattttgggaagtaaacgtaagcttctgtgccgaaatagtaaagtcatgcgacactctcgctacgccacttgttgtatgttgtgcggcttgtaccgaacctttctcttccagaacatctatatattggcgccctctaaactctatgttatatacaaatacatgaggaatagttatttcgtattgattgtatactacgggaatttcttcctgcatcatccagttgtctatgtgtacggaatagtcggaagtcattttatagtgatattcgataactgtcccgaccttgacagcaggcaatgaaaacttcaatactctgtgataggtattcagcctctcatcggaaacgagctcccgcttcagacgggttttaacaagtttcccattttccagattataggaacatccgtccagatcggagatgcggtctttctccttatctctgtcagaaggcgcataataaggaatggctacatcagcttgtgaaacaccttgcggcttcaatatcttgatgcgtacccaatgttccgtatacaattcaaatttatcattataagtaaaaccgctcttgcctttatgaaacagataaactgccactgcggtagtgtcaggagcgtatgtctccagtgatagttcctccttggagggtttgccatacttcaggtcaggcttaattacagtagtagcttgttgtgaaaaagccatcgggaagcataaagaaataagcatgcagaaaataaatagcccgtgtttcatgatttgactttttaagattaccaattgtacaaaaataataattaatacaatacagcggcgttgatcttacaaaaaaaacaggtatttttgccacacacattatttatattgaataccatgaagaaattagcttttttagcctgtctactccccattctatgggcggcatgtagcagcactgcaactacccgcaaagaatccggtgaatgggcaaaagttcccgaaatcctgaagaacattgttccgcctacttttccggacagtatatatgacgtaactgcctacggggcaaaaagcgatacgagttttgacagccgacctgccatattggaagccatcaatcaatgtaatacaaatggtggcggcaccgttctcatccctgccggaaactatttcagcaaaggcaccatcttgctgaaaagcaatgtaaacctgcacgttgcagatggcgcacgtctggaattctcgaccgtggcctctgactatctccccatggtattgaccaaatgggaaggaacggaatgtttcaactactcccctttcatctatgcctaccagtgcaccaatgtcgccctgaccggcaaaggcacgattgacggcaacggagctgtaactttcaatggttggcacgccctgcaaggtcctgccctggatcgcttgcgccagatgggtatcgattccatcccggtatacgaacgcgtattcggagagggatattacctgcgcccatgcatgatacaattctacggctgcaagaatgtacttgtagaagatgtacagatctacgattctccgttctggattatccatcctgtattctgcgacaatgtcaccgtacgcaatgtatatatagacagtaacaactacaacaacgatggttgtgatccggaatcaagcacgaacgtactgattgagaacatggacttcaatgtgggagatgatggtatcgccataaaatcaggacgcgaccaggacggctggcgcatcggccaagccacggaaaatgtgattatccgtaactgccacttcgcccggtgggccattaccatcggtagtgaaatgtccggtggcgtacggaacatctttatcgaggattgcaagatagacagttgccgcaacggtatttacttcaaatcaaatctggaccgtggcggttactttgaaaatctaaacatgcgccggatagaagcggacgtctgcctgtggggagtgattaatttccgtacgaactaccacggataccgcggtggaaatcatccgacactcttccgcaatatctgcatagaagatgtaacttgcaaccgcgtggacagcgtagcactcatggcaaacggattaccggaagctaaactttataatatcaccctgcggaacataaaggtaaaacaggcaccgaaagccatacagatggacaatgtagtgaacttaacgctcgacaacgtagaggtgaacggtaagcggattacttccgctgaacaaactgattaacagcagaaaggattatgtccccatgtccggaacatggggatatttcatttattcttattcaacttaataaactcactcggagtaattccaaactgcttcatgaaacatgaggtaaaatatgaagtggtagaaaatcctaaactctcagcaacttcattgatccgaagatcacctttagccaacatttcagcagctttctttaatcggcataaacggataaagtcattaggcgccaaagaagtgatagctttcacttttctataaagtgtcgatacgctcatattcatatattcagccaggctttcaaccgataaacaggaatcagacaaattattcatcacataatcattcatctttccgataaatttctcatctatactgttagacgcaacacttataagatgcgcatgaggtgaacggacaaatgtagaacggataagctctctgttagctaaaagatttgaaacctgagccagtaaatgctctgtagagaacggcttctctatataagcatcagctttcgattccaatacatcaatatgcgcctgtaaagaaactttagctgttaatacaataataggaatatgacaatattttatatttgttttgacagacttacacaattcaattccatccatcaccggcatcatcaaatcactaataatcagcgatactacatgactttccaatatttccaatgcttgtttcccattatcggcaaccaacacattatattgtggggttagttcttcacaaacaaactgacgcaattccacttcatcatcaaccaccagtacattatacatactcttatgcatatagtctttatttccttctacagaagaggtttccttataaaaaggagaatgttccggctctgcaacatcatgctgttccaagggtaaatcaagcacaaaggaattcatctcagtaatggaattatcaagataaaaagcgccattatgcatctcggccagtgatttagctaaaggtaaccctaatccggaaccttttgccggtactcttgcatcttctccgaaatactgaaaaaaaggtttaaagatgtctgttgtcacatctttagggattctttctccatcattgttcaccctaatccgaacaatagaattgtcttctttctgtatactcactaaagatacctcaacaatatggtcacagaatttaatcgcattgttcaacatattacttaatatctttatcaaagcctctttatcagctattatttcacatccctcatcaggcatggaaaaatgaaaatcaatgcatctggtttgagctatcggagtaaaacggctataagtctcttcaagtagttgtttgatatccagttttacaaaactcatcaagaaggtagaagattctatctttctgaaatcaagtagctgatttaccagatcgagcaaacgctgagtattcttactcataacagctatattttcattctcagcaagtttcttttctcccgactttattatacggttcagtgaccccattatcaatgtcaaaggggttcttatttcatgagtaatatttgtaaagaaactaatcttagcctgaagtatttccttatacttctcgttctgtaacatttctatctgatgtcgttccttctctttgagttttcttctgtatctgatgaaaaaccaagtaaatgtagtaaagataataagaacatacaagaaatacgcaaacggcatactccagaagggaggttttacaatgatagccaatgaagaagcttcgccagtccatgttccgctttctcttgaagcttgtacacgaagggtgtatttccccggtggcaactttgtataatacaacttcttaggcccttgactaacaatccattcatgatctaacccttcaagcttatatctataccatacatcctgagaaatagaataagtaggtatagcaaaatcaatactaaaagtagactgatcataacgcaatgttattttatctgtaaaaataatcgattgtttcaaaggagaatccggttgataggtctctatttctttattaaataactgaaaacctgtaaagaatacttttaatggttctgatgcctttataaaattctcaggcgagaaagctatcattcctttcaatgagccaaaataaatattaccgattcgatcctgatagccggaattataattaaattgatctatcggtaatccattcaacgttgtaaacctgcttaaagctttctgctcaggatcataatgcaataaaccattcgaagtagttacccataacattcctgtggcatcctctataatctgataaataatttgcccggaataatccagtttagataaagtctgagtaaatgtcccatctgtcctgtcataaagaaaaagcccgtttccttcagtaccaatccataaacgcttccgggaatcttcgaagatagtagtgatatagttacttatgaatggcattgtcttaactgttatcttctcatgtatcccattatatttgaatgtaaacaatcctctccccattgtaacaacccataaagtatgatctaaatcctcataaatggaatgtacaagtccccagtccagttgcggaacaatttcaaatctattctttgactctacatagcggtataaccctcccattgtaccaaccaatatttcattaaaagaagtcttcctgaaacaaacgatcccattaaccaataatccggaaccagtattctcactacagaaatgattgattatattttgcgacttcaaatcaaacaggtaaataccactatcaaaagttccaatccatatcatattcttatcaaccagcaagcattgtatatttttggatatgggacgtccatcccatttcagattagtcaacgccctgaatacttttgtcttggtatcaaaatagcataaccctccatcttcagttcctacccataaatttccttccacatccggatgaatttcacgaataacatttgcctttatacttcctttttcatctttcggcagatacttatcaaacaatgtattattactcgacaagtaattcacaccaccaaaaaaagtccctacccaaataccttcttcacggtctttcaacaacatatgaacagcattatcagaaagcgaataagcatcattatacgacttctgtaaatgatcaataaatcccaagtccaattgatagatatgaatgcctgactctgtaccaaaccagaattcatccttattccgttgaatagccgtatggatataaataggattattctgataatcattgctaaacaagactttaacttcaccattgttaggggaaaaacgtctggccccaatacgatctgtagtcacaaccaagtctccattactacattccagaatccgataaagtagaatatgttttgttttctcttcttttgtcaatataggataagacgaaaactccatacgttgagggttaaacaaatagatattaccatccagacctaatacccacacactaccggactgagtcactgttatccctgtaggcacaaagaaatcagatgcagaaaaaaacttatgatttccattttttacatccaagcaatatatgcccttggaatttataacccaaaggtttccctgcttgtcaaaaactaaattatctattaaaccttcaattgccaggtcagcactgacaaacggagcaaaagtatccttctccggattgtaaatacataaaccatctgaagttcctaaccaaagagaaccatccggtgcttccgccagagcaagaactgtattgttgggaagagaattgggctgttccggatcggccacatagttcttaaactttgtaccatcgaaccgattcagaccaactttcgtgccaaaccacaggaaacctctacgatcctgaactgcacagaaaacagtttgctgagaaagcccattctctttgtcatatcgcttaaaataatagttttcggcaaaaaggttagctactaccaaagagagaaaaattagtaataacgctatttcttttttctttatgagcataactatacaatatgattcattgaaagtgatctacaaatataataaaaacaagctactccctcagcaacagatggttcttttccgatcatatatcaaaccaaagccattctatctatggagaggttttccacctactccatagattgtcaatctactacgaagttcaggtaaactcatatcaatctgagatagatctttttttccgaaagcttcttccagattaacaatcggctcaatgttcgcaatgcttgcccatggaagccacaaggatacagacctgaaagctaaatcagcaacattagttgcttccggcataaatgcacgatatttataattcattctaccgtcaaagtctgtattcagtttcgtattattctgtaagagttttgccatatgtaaatagagttcatttccggttttgatatacaatttatacatttcataaaacatataagctataaaattatcagcacccgaatgtcctgtagcaataatagaaaaccctgtaatgcctcctttaacaaaaggattctttttggcatccattgcatctcggttaggaatggcaaaatcataacaatatgtccagctcatagcacaatttgcagcatgttctgccgctttcagatatttcagatcccctgtcagttcatgtatggcattgaatccgtagagagcaaatatagctgcctctttatcaacagtattaggattgtccggagttccacctacatatttccctaatttcaaatacagttcattataagagaaatcagcagctttgattgcagcttctttatatttagtctctccggtatgttcaaacatcttcaccaggaatctaatagccaccggagtattcaatttagaagtaccatgagtattcctatctcctcccgtctcaacatcaccattcgtcttatatgccctataaaaagagccgtcttcattttgtttcttcaccaaattagaagcaacccttttaagagcttgattccacgcttcctgaggctcattgtgagccacagaaatacgataggcatccagtaatccctccatgccatccacaaaacatcgaagaaaacttggatattcccgcctttgtccggctgtggcattatcagcaggatcccaccatacagtggggaaataagttttcatgatggcatcagaaacccagaaatcaaccattgatttacccttttccctagtctctgaatcatgatgatccagaccataacgatacatgtgatatccaacggctatttgttgtcccacaaaacccatttgaaaagatatcccttcagtgtttgtaccatcaggtaaatcaagtgaccatggtaaacctgccgcttttatgtttccctttccaaacatccgatattcagctttaaaaagttctatattctgccgataaatttcatccatattcatatccacgattgtcggttcttccgttttatagcccataccaaacgcatacatcatagcttcattataattatcctttttatcaggaatcaaggctacagaatagctatgtatattaccctctttcaccgaatggtatcttttggaccatatagtctttgcatccctttttcttccggcaacttcatacgttctgggcccttctgcacacggataatgaaaatccaccgacaatgaaggatatatagagtaacctattgaaccatattgtaacacatcattcacctcatagaatgttccaccaccaggattttgtccgacatctatcctaggattataatgcatgagggttaaagtagttcctgttatcttttcccgaagcatagccagtggcagtcccgtacgcgtttcttttacatacatccggtcagtattcaggtcagcagcaaccgcatcctctcttacttcagaggtatttctatataaaacagaaggaataaaatactcgaaatcattgttatcagacgaacgaagcccggtttgaaatgaaattgtactggcaaatccgacatcctctgcccgtgcttctttcaccttcacatctctatatatcccaaatactccatcctttaataaagtatatttatcttctacaataaatacagaccctttttccgtgttgacactggctgtagcacaaaagccatatttctttcttatgacctgatgataaggttgcttataatcagtttcgatatattcccccgttggtaaagtatcacttccccggacagtgatccatgcaggcagttcttggcttcctactatctctttaccattctgtaaaaatacagcaaaaccttcatccccttctcttagtataagggaataatcaccatttttaatgattttctctgtatcactttcttctatacattcctgagaaatagttttcaaatcacttttcccgataatcgcatgataatggcaggatatgcccaatagacaaaatcctgatatcatcagcatccggaatacaacctttattattcttctatctttttccataagttcctgaattaatatattattccctgatgtgcagcatataccgcatctttctgtctcaatgtagataaagattctgttcctatacgttctatatccatatctccataagcatcccgtatcttgaacaatggatctaaagcagatgcagtaacccagggtaaccacaaattaaccccatctccccaacgggtgaccaatcttaaggcttccgtctgcaatcctcgataagcataccccaacgtaccatcataatccatagtctgtttcgtatttttctccaatagccgggcaatatgcaagaaatactcatcgcctgtcaaaacatagagtctcaagtattcaaaagaattatatgaaagcccacaatctgctccggaatgtccggtggaaatgattgtaattccaacagtagtctttttgctatcccaagccatgaggttatttcctccggccgccggaatattccaagcatacatataggttacagtgtaataagccgcttgggatgctccttcaagccatttttcatcttcggttaaatcgtacaaacaaaggaaagcctcaataatcttttgcccggactcacggtcttttacatacggattatcaattacacttcccacatatttatagggttcatgaatctcgcgatagcaaaattctccggctttaacagcagctgtcttatagcattcttccttagtaactatatacatgtaagtaagaaaacggatcagattggaagtaagtagtttacccgaatctatagaagttccgccattgtcaaaagctttgtcccagctaccgtcggcatattgtcggctcaccatccagtcagctgaccgccggcaataatccaaccaattagttttacttccgggaaaatgtttttcagcatgcgaccatgctaaaatcatagcctccaatccaccttgcatattacgtaagtcattatgattacgaaagaaattccaaggagatatatcccaccatatccgtggcatcccattaggcgccgaactgttctccgcccagaaatcaagtatctgctctcccttatccgtatagatggaattattggtttccaaacctttccggtaaagataatatgcgcaaggaatctgcatccccacaaatcccatagaataggaaatctcattcacttctccacttggaagatatacggagaaagggaaaccgggggcattattatccttcagccaataatgatctaaaacctccagactgtaattcattacatcttcgttatccacctccaatacttcaggattgtacagattgaacgtcgctttccagtgttcctcaagcgcttttggaaaagctgcttcttttttaaattgcaattccagcatataggcatgctctacaccaacccgtacaggatgactccgacgcgcccaccgtctttcatgacttccacctccatctgcataagtatgctcaccttcagaaccaggaaaacaatatactaatgcaggactttggcttgccaaataaaaacccaatgagccgaaatgcatatccgcatttaccagatgatccattcccacctcttccttaaaagtaaccggattgagattatagtctgccaaagcaacagatacctccgaacttttatttctgaacatggccagaggtaatcccatacgttcctcacgagccagtatccaatcatgagtaaaatctgctcctatggaggattcacttaaattagattcatctttatatatgagagaaggtataaaatattcgcatccggtaatagcttgctgtacttcattccgcaccataaagtaagagttgaacgcatgatccttaccggaagctttcatgacatctactactctcgacaagcgtaatctatcttcattctccgccacggtatatatatccgtcacttcaaaatcagaaccggagtctgtgattatcctggctttacaaaccaatcgatcattttgtttttctgcttcctgatacgctgccctgtaccatttagacgactgtacacctactgggaatacctctaaacacacaatcgcttcatcgacaggtatatatttctgcccccatcctgctattgttactgtataacctgtattctctttccaggcgagtataagttccggattaccggaacctatactaatattttcattatgaaccgggcctggaggctcctctgttaaatcatcattatctgaacatcctgcattcagcatcaggcaaaaaacaactgttataattttcattattttattgtccatattctaaattgcatagatagtaaatgctgtaaatgataatgcattcgtttctccacccgggaaattgactacatatcccatactaacttccgtttcttgttccaaagttatattaagtggcatggaaacacgacttgcaggatctccacaatcactctgggctataatactcggacttttccattcaattcctttaccttttgctacaacaaagaaagcacggtcttttccaccttcattttcaatatcccaccaattgaaaccacgggtagctataaacaggtattttcctgcaggcaaagtgaatgtctgataaacagctccctgtaaggcagtaggattcccccagttctcagcacacataaacaagcggtcactccaaccgtcatacattgtatactgtacggctgcgttagatgttaaccagtctgaaaggatgccacgacgagaatccgggaaataggaaacaacattaaacggctgtttataattctttaaatattgattcgtaatatcatcaaactcttccggaattccagtaatttctttcgtttctgagaaaagataataatcaggaatgttctccaactcaagtgccacacgataaaaagcattgtccctgtaattctctttatagccggtacgatattttatcgcatctatagacaccgtcagttctccgtcaccgctaaaattagcatccacttcctgttcggcaacaaccggacttttactgtttacaaagtggttaatacctaaataaatacgagctttcactatacgtggagcaggcttacttgttccggaaactttcttcaccttaaacttggcaacaatgttaatgccttctaattttgcatccaaatcagatatctcataataaggtgtgatgtgaaaatcctgacgtacatcctttttcagatcataataaatagaatcatatcctactgtcccagctggaaactcatttatttcgaacggatactttacattccctaaagttagtttatattctccggaatgtagcaattgctggtatgaaccatcagccaaagtgtgcattttcgttccccagtctaccttaccaaacccttcctggaaaaagagaaatatatcacgcgcatcattaccatcacatagaaatggtttatcattatagagtaattgcccagagaaagttacgctcggcgcatcataattatcatactcacaagcagtaaacaatatcgtagccaataataatataataatcttcttcataatcaatttactattaataggttttagtgtttcggattcttctcaatatacggattaccttctgtcatcggatattctgcataatacatatcttgtccgaatcggataggtaatcccttctcattatcattaccacgatgctcaatatacacccttcggaaaagccactttccatcttccggctgtcccggagcatacactttataaggccacaagccagtcatccgggctgtcgaagtattccagtcacccgaccatatctgatcagcaatacgccacctcttcagatcataaaaacgatgatcctcaaaagccaactctatcttacgctcattctgcaaaagtgcaagtgtcaaatccgaactttcaatacggaaagcggtacctccggcacgttctcttacttcattcagacaatcagaagacaactgtaatgtattgctgcctttataattagcaacaccaagttgattaagataataagcagcctcagccgcattaagcagaatttctccatatcggaaaatgatatacggtactgcgctctttcctgatgcttcggaaccagtaaccggatctatatatttacgcaacaagaaacctgtatggctggtataataactattacggataggaccgtcaatgctggtcagttgctgcccattataaaagtttttgtccggatcgtatacattctcgattaaatccagcattttcaaatcataaccggaagcagttttcacagccagccctgcctgtaattgaatctcttttcctctgaaatccgtaccaggcagaattacggttccccacaaacgcggatcacgtccttcgaaaatacccatcggagaatcataaagaacatagttataagcggaagtttcatttcccattgattcgataatctcattacccacataagcattcaactgtgatgaaccggaatttatagtttcaaaactctcgaccaagtttaatgtcgggttcacatggccaccaaaattagcagttgaacgttgagaacgaggaatattccacactgtaaaattgtttgggaaatcagtacttccatcataatcacgaatgagaataagttccgggttattcgtcttggatacaaacacattattaaagttctcacccagactgcttccagtaccttttagcaaagaataccgtcctatttcctttagttccagataggcatcaatacaactttgcagatattctgttgctttattcttagagattccaactgctccgcttgtcaaggtcaatcccattgttttacttttatcctcattgtaggctaaagtacctgcatataacattgcacgtgacttgagtgccaatgcagaagccttagtggcacgtgtgagtaagctacttccctgcggagcaatatcaagcgcctctttcacttcatccatttctgtcgcaacaaactcatatacggctgcctctgtatcacggggtttagcatattctatcggagtagtactataatcgtacacttctgtaattaaaggtacacctcccagatttttcaccatattgaagtaagtaaatgctcttagaaaacgtgcttcaccaagaaaataagcacgttgattttcaggcaaatgtgaggttttctctgacaaattcctgatatgaatattgatatcccttatcagattataatcatagtaattacggtaggtacgaccaacattactcgaaaattgccaataataactattactggtagcctcatcccacctgcatatatcataagattcattatccgaagcgaagttctggtccaacttgatgcgctcgtataaatttgcagcaatactactgatactggcaacagatgaatatgcttgatcctcggataattctttgggatcattctgactcaaccagtcttcacacgaggtaaagctcaacaaagcgacacatgcatatactaatatttttgttttcatatttatgctcttcttttaaaatttaacgttaacacctaatgtcaataccttatgttgcggatagtcctgaccattcactgttgaaatttcaggatcaaaaccataatcatgcaacgaactcagacagaaaagattggttccttggaaatatatgcggcattgttccatacctacctttcttatccagtttttgggtaaagaatagccaactacaagattacggagacgcaggtaattaacttctctcgtatagaaactgttccaccaacgccccgaatgactttcctgtccacgcaaggccgggaatttccctggaatccaaggagacttcggatcaaaaatatcttcatgcctccatacgtcaatattgttatagtaatatccattcacgctgcgcgttacaccccacttcaaatcccagtcagcaacaaatgtatttttaaaaccaccggcaaagtcagcagccacatcaaatcctttccattcaaagcctaaattaatgcccattgaaatcaacggattcttattggatgtacttgaatcccagggccagtcagccgatgcataggcttgaggacgttcgtcaaaatcattgataattccatcaccattgacgtcacgaagtattacgtcacctggacgaacagtagcattattttgaccgtcctgatcaaccggataactatcaatctgttcctgtgtttcaaaacgaccgataacttcccacatccatacacctccggcattaccctgatctgtattgagcactacattggaccagcgattggattgtgcccaacgatatttatcccatgcattaccgaatatttctccatgacgtttaccatttttctgccgggcaaatgttatattagccccaacactatactttaaatctccaactttatcattccatttcacaaatgcatcgaatcctaccgtcatatctgaattcatattctcaggtaaagcactcaaacctgtctccaacggaaacataatatcactcggtgtacccggaataccatcacgcatacgtttaaagaggtcaaactctcctgtaagccgattatcaaagaagccaaaatcaataccgacattcatcaatttaattttcatccatgaaatggtggttacaggaattcccttaggtgccgagcctattacttttttacttttcacagaactgaacgggtcatcaggcataagtgactgacctttgtaataagtatacccggaaaggtatgcaaagtcaggatacaaaccgcccagattatcatctcccatcataccatacgacgctctcaacttcagattcgaaaaccagctacttatagatgaattcttaaaaaagttctcttccgaaatacgccatgccgcactaattgagggaaaaaagccccatcggttgcctttcgggaatttccatgaaccatcataacgggccgataaatcaagaatataacggttttcataatcataacctgcacggaatacccagctggctgtagaagttatagctttattctcgcttaccaagttgttatcattagttgatataagatctataaattcattttcaactggatgttgctgtacattcagcgaatgataatcccgtttggtaaactcaaaaccacctacaccagttacatgatgtttaccaaacatattgtcatagtttagcagaaactgtccggaaaactctttgatagtcgtatcaaatctttccatccaagtttcattagcagctgatttatcataggctacaatgtattcatccgcagccctgtcataagtatactctttccaacctttctccagattattcaccttattctgagaggtccaataggagaaaatgcctttccccgtcagccccttaataggtgttttccactccatatcccaatcaatctgtaccacggtagtattgttatctgatttacctgcattatcagtagttagtgcagccaggttaagaccagaagcaccgggtacattattcaaatagttggggttatcatttgcataaggacgataaatgggcggaagattaaaaaccgcctgacgggcatttgcataatcatcactacccggaagagctggattagtacgattctccaaacgtccgttcaaccggaaacccaacttcagtttctcactgatatcaatattgaaattagactgaatattagtacgttgaaaattataatccttgaaaaccgcatcctggtcaatattactgattgataaataataggtggtcttatttccaccaccactcaggtttgcatgtatgtatgattgaggtgctgcattactaacatagttatctccccaatcaaatccacgatagtcttcaccagtttctggattataatatcccgtacgccatttttccaattcagctctagccacatccggagcaactgacagggtacccagattagcctccttcatataattagcatattgccattcatacgcattcaacattctgggataagaagtccatgattgccaactgtaattgaagtccaaagttacggctgccttttggttcttagaaccattttttgtagtaaccagtacgactccattcgctgcttttactccatagatggcagctgctccgtctttcagtatagaaatgttctcaatatcatttacatccagattattaaactgtgcctcatcttttataataccatctatcacaaagagaggagtacccatatttctgatctgaatagaagtaccgctacccggctgtcccgacttctgtcgggtagtgataccagctattttaccaaccaatgctccagaaacagtcgaagaagtagtacgggcgatatcttctgtaccaatagtagtgactgccgcagcaatactccctttacgtttagttccatatcccaccacaacaatctcatccagaatttcctgatcttctttcaatataacagaaagaaatggtttatttccagctgtaacttttacagttttatagcctacgtaagaaaattccaaaacgtcggtaccagcaacattcaactgaaacattccatcagagtcagtaacagtgcctgcactcgtaccggcaacccgtactgacacccctatcaaaggttcatcattgtcatcggtaactttcccttttaccgttttctcttgctgagtaataacaacagactttgtcgttgcatagccttctgatatgaagaaattccctaaggctattgataagagaataaatttcaacaagcgaagcttgttactaaagaaatcgttcatcatcttattagttttaaagattaataaaacaggttcaataaaaacattaacgagggttaacaacatcgtaatgcaaagatatccccctcattcaaataccagtgaaaataagccgtcattaagtatcaataatctgttatttcaggcgtttgaatgatttctagtattttttgaatgattacttttgagtgttatatgtatgtttgcagcggttaacaacactcccgtattattataaatctattaattcaaccattatgaaaaagtataatttattatttgcttctctcttattcctatttcccaatgagacgattgctcaagaaagagcaattataaaaatagacacagatcgcgtaattgaccagatcaatcctcatctatacggaaatttttcggaacatctgggacaaggtatatatggaggtatttatgatccgaagtctattcaggcagatgaagatggctttcgcaaagacgtcatcgaacagacaaaagagttaaaagtttccatcttacgatggcccggagggaatttcgtttcaggttaccattgggaagatggtattggagatcgtagcaaacgccctactcggattgacctggcttggggaggtaaagaaagtaatatgataggaacagatgaattcattcaatttgcccgcaaagcaaaagtggaaccttatttctgtgtcaatctgggaaccggttcattggatgaagcacgaaattgggtggaatactgcaatgtggagaaaggaacatactactcagaccttcgccgtaaaaatggatttgaaaaaccgcataaagtaacgtattgggggttaggcaatgaagtagacggtccgtggcaaatgggacacaaatcacccgaagattattctaaaatggcaatagaaacagcaaaattaatgcgctggattgataaagacatcaagctcattgccagcggttcaagcaattacgatgccgactggaataaatggaaccggacaatactggacgaaatgtataactacatcgattacatctctcttcatcattattcgcacaacacctcagattactacacatatctgacaaatactattgaagtagagaactacatccgtattgtagaacaacagataaaggaagcgaaaatgaagaatcgttcttccaaagatgtttttatagctttcgacgaatggaatgcatggactcggacattcggaggtactgacaataccctatcggaaatatatgatttacaggacgctcttattgtagcgcaataccttaatatattcttacgtacttgcgacattgtcaagatggccaatatggcgcaattagtaaatgtcattgctccgatgcgtgttgacaatgataaattatggaagcaaaccacttattacccactctatctttttgccaataactgccgtggaaaagcactggacatatacataaaaagtccggcatattctactgataaatataaagaagttccttatctggacgtttcatccacttatgaaccttcacggaacgaagtagtgatcaatgtcgttaaccgtaataaagacaaagctattacagctgatatcctttctcaaaccggctctttcgataaaaaagcgacagccaatattgtatcaggagcaaatacaaatattacaaactctgtaaacgaacagaacgttgatataaagaaagaagaaataaaaacttccggtgagaaaataacatattcatttgctccgcgatcattcacacagattattgtaaaagtaaagtaatcctctttcacaaaatgacatcattctttataagattgtcataacatacaaaggctgaatcaaactaggatttttgattcagcctcaactatttgaatatatactttccttgctgtattactccgtaaccaacggacgtttacgccagtcatccttcacatagctgtcgggatagactgttttatcttttaactcaccacctttcaggcgtatccaggaagtaaaggtacgttccccctccttcaacacaattacgcgtgcaccgttagataaatggttatattccgtattaccacctgtgaaacgtccataagccagtacgatacctttccacataactgaatagtcattatcatggtcatgtccgacaaaagtacccattacatcacctgcctccttcatagcggcaaacataccggtattaatagcagctgaacaagctttctccatacgcgtaccataaaggatggcgttctcatcagaagctgcttcgttgtattcggacagcgggatgtggaagaatgccaaagcaggcaaaggctttccgttattcttagcggtaaaagctgcactttgttgacgataccagttcacctgatcgaatgtaagccagtcataccctttcacatccggtaatttggagtacgagtgagaatccaggcaatagagcactgaagcatctttcttaccatccgaagatttcacggtgaggacgtagtcgggagactcaacgctaccacggtcgggctggatgttgtaaggcatggaacggattatatcgtataattcggcacgcgttttgccttgttcgttatcatggttaccgaaagtcacgacaaaaggtatcttacgggaggaagcacaatcaagcacggctcgcatggctgtatcagcaggcggtgcataaactacatctccggtaaaaacaatcaaatcgggacgttcggcatccagaacttcattgatacgcttcaaggcaatggctgaagttggattgtgatactgaaaatggatgtcggtaaactggacgattttaaactctccgttcttgttaaactttaagggggcaacctgtgcctggcagaacagaactgtcagaaaagccagacaaagggttaaagaaattctcttcatgttgttagtaattagtttttaggtagtttattaggttgaaatcagtattattctttggttatcaaaactgttgcataagctgagataccttcttcgcgaccggtaaaaccaagtttttccgtagtagtggctttgatggaaatgtcgtcttcatctattcccattactttggcaagcgtctgctgcatggcgggaatatgggatttcagtttggggcgttctgcacagatggttgcatcaatgttgcccacggaatagcctttggttgcaatcagttctacggttttcttcagtaatattttgctgtctatgtccttgaactctcctgcggtatcgggaaaatgataaccgatatcacgcatattggcggctcccagcaaggcatcgcaaatggtatgaatcagcacgtcggcatccgaatgtccgagtaatcctttctcatgctccaggcggataccgcctaaccagagttcacgtcctgccaccaactggtgtacatcgaagccaaagcctacacgtattttcatatcgttcttcttttattttattggatgaatgcacgaaagtacggaaaaaaaagcaagtggggaataaagacagaacgcaaattacacaaattacgcaatttttcgtcttatataaggcaaccgataggggcctgaaagaaattgcgtaacctgtgtaatttgcgttctattccgtattccttatgatttacggtctatccggcagttgggacagcaggtctttgtagaatgccctgacgtccttccagtgatagaaaggagcgatgtcggtcttcaccgggatactcacttctttctcgttcagcatgaacttcacgatgatatcgtctgcactgcctttcttacggaagaaaacaatctgcacattggcagccataggcaccattttgaagttacaccatgcctgatagaatttggccggatcggactcttcattataacaattctccagtctcagcaagcctaccagaggaataacattaccgtcgtgtccgaagcggaaagtggccgagtttgtaccggaggcaatcgccgcgtctgccgagtccatgatattctcaaccagagatttagcgtttgccagcatcagtccgttcgtcatgggcgaagggccgtcgcatacatagttcttatagttatgtatctgccagatatcaaacaattcctgcttctcaaagatatcataaaaacaaacctccggttccacgttctgcatatcagaagcaacccaatacagaccgcgcatcagttcttcaggattcacattcttacgaatatactctttgctattgaacagtgtattcatcagacgttccggacggacatgttcttcttcgaacttacggaattcctcataccaaggccctttgcgtgaagtaaacttcatagcttcctgtgtatggaaatttaggtaatccatatatttattgctggattcgcgctcaatccgcatcttcgggttgaattccttcaggcgttcgcagaatgcatccatgctgagcacgcaacggataactacggtagagcgggcagacatttgcggttcgcctttaaatacttcagggaatgcctgatacatacgttcggcaatgcctcgttgttgcttcactcctaccggactgaggtcgccgccgtgtcctttggcatctgcccagacaatgtccagacgtttacggacatcttcgcccaaatcggttaatgctccggctgcatgggctttctcaaatacttccatcacgcggacgtagtcttcatccgcaattagccagcgggaaccatgacggccatagtgactgatatagaacggttcataacctttcggagccttggtctggacgcccgaaggaccggggtaagcgtaatatacaccacctgtcgttgcaatatcattgaagatttcttcgcgtgtggcttgtgcatataagccttgcacagcaaaagcggctaacaggacgatagaaaaaagagttcgtttcattctcataaacaagttgttatttttaatgtatttattattgtattagtaaaaacgttataggaatgaataagactcaccacagattacacagattcacatagatttattaatctaataatcagcaaaatagaatctgtgtcaatctgtgtaatctgtggtgaattaattcataaccgaaaagtaatgaatcaaccttcatccttatttctgataatccggattctgtgtcagatacgggttcgtggtaaactcatcctgcggaatgggatacaatttgtacttatcgttcacatctttacccacatacgtaccaacttcaccgtcgctgctacctttccagtcccagttatatccttttgtgaatttgccaaagcggatcaggtctgtgcgacgcaccaactccatattcatctcacgggctctttcatccagaatgaagtccagattcaactggccgtcggtaatacgaccggataccccgtcaccatagttaccagacatataagcacggtctctgatttcatttacataacccagcgcctcagcacgcgtgccttccgcagccccgcgaagaatagcctcagcagccatcaggtaagcatctgccgtacggaacatcgggaggtctacagacgaatacttagtaccgccatctaccaattccttacggtccttggttacatttctccatttgatgcacgcataaccattctcaaaagtcttctggaaagccttaccttctacccaagtttcctttgtatgaccgatagtaaagaactgtgcacgcttatctttcttattatctccccagggatcattttcatagaaggtttggtcagcctcatcaaacttatctacaagcgccaccttcacacgggcattaccccaaccacggctacctactccggtttttacatagctatccatcggaccattcatcaatgctttaatcagaaagttggttccggcactgctctgtgcatagtcagcatcctgcaccaaaggccagataatttcggagcaagtattgttatctgccaggaagatgtgacggtaatcagaagccaacggataattaccttccgtaatcactttcttggcatatttataagcattggtatattcattcttgcctacccatgtttcggcattcagatagacacgtgccaagagaaaccaagccgatacacgatccacacggccatattcattccgcttcggttctttcagcaaggttgtcagttcttccgtttcggaaaccacatagtcgtagatttcctggcgggtcttctgatgaggaatcgtacctacatccatcgtttcatcaatgaaaggacccgaaccgtacaagtcgcaaatcatgctgtagcaataagcacggatgaagcgtgcttcggcacggtaataaggcatttcagcctgcaaagcatcgtatacgccacggtctttcaattttccttccgtactttcgcgcaagaactcattacagtagttaatggccatatacagacgataatatgaatagcaaataatctttgtcgaagggtcccagttcatatacaacagtgacaaacttccatgactgccaccggaatggaaaacgatctcatccgtacaagcctcttgcaaatagaacagggcacgtgtataaccactataaccttcatcaatacccggcacgtcaccgtttccgccatcaccacccttttgtccggtctggataaggctggcgtaacactttgccaatactccgatgtatccctcaggcgtagaataaaccttctcgcccaccaattcattgtcgtccaaaggcaatgtatccaaatctcccagacaagaagaaagaaggaagagagataccagacatatacttactaacttgaaatatttcgttttcattgttttctgatttttcatgaattaaaaattaagatttactcccagcatgaacatacgcgggcgctgatagatgttcttatcgatgccgctataaatttccgggtcaagaccgctatagcctgtcagtgtacatacattctgcacggtgaaagagagacgaagagaggtcttttcgttccacaacttatcgaaggtatgtcctaacgtaatgttgtcgatacggaagaagtcgcctttctccaggaagtaatcggtatagatgcgatcctgcgtaaatccggtttcaagggtagaacgcagaatattgctggaaacgccggttccgccataaagtccgtccaaagaatcggaggctttcacatagttataaacataagcaccgaagcttccatgtccgttgatacccaaatcccagttcttgtatgtcagacgggtagaaagaccgcagtagtaaggagctttggagcttttgccggtcacgtacttgttggcatcttcttcgctgctggtgacggaaccatcttttgcgatatatttgccatccagcggcttaccattatcatcataagcctgttgcaacaggtagaaagtattcggagtttcgcctaccatgtggacttgcagatatttacccgtaccaccggcattacctgtcttcacatagttgtcttcacggtcaatggtgttcagctttgtaatttcggaagtattccaggtaaaattaccgctgacagtccattcccaatccttattcttcacgggaatcacgttgataccgatttccagacctttactcttcatattaccgatattggtctcaatcatattggtaaagttgcttccggcaggaacgaatatcttattcagcaggtctttggtagtacgccagtagtagtcaatcgtaccggagatgcggttgttcaggaaaccatagtcgataccgatattataagtttcggtagtctcccacttgatgttggcatcgtagccattgggacggtaagtagtgtaccattgatcaccgaagtaatagcgggattcgtcataagatgccgtataagtcggcaggtgctgatagtatgaaccgatggattgctgaccggtctggccgtagctcaaacggagtttcaaatcggacagggctttgaagttcgagaggaaagcctcttcgttcacacgccaggctgccgcaactgaagggaaatacccccaacggttatcgggagaaaaacgtgaagaagcatctgcacgcagagtagccgtcaacatgtagcgttgtttccaggagtagtttacacgtccatagaaagaaagcaggtaaagttcggcttcggcatgctggggagtagccagttctttgccttcggtgtcggtggttacactattattcttataccagaaacgttgccagccataaccacccatgacattgatgtgatgatctttcagttccttatcgtaattggcatagaaatcgagcaaagtgttgcgcttggtctgatggtatttatagcgcttgcccgtaccgtcattctgatttccagtgtacatggagggagcaagatcgggcacattttcacgattgtcattcttctggatgtcatagcccatattcagattgaagcgcaggtcttccaatccgtgcaccttgtagtcgagggcaatgttaccgatagaacgttttgttttttcgagtttgtcagccagttccagatcggcaaccggattcgcagcggccagcgtgatgggtttaccgccattcatccatgtataatatcccagacctacattaccttcatagtcttcgtaaacaggacgggtaggatcaaaagagatggcactgccaatcacgcctgttgaaaccggttgattattctcaatacttcccttgacgttgatatctacagaaagatgtttatcaaagaacttcggagacaaacctacactggcgttgatacgctcgtagttattattcttcaatgtaccattctggttagtatatcctacggatacacggtaaggcatattcttcaaagctccggtcatggacaagttatgatccgtacccaatgccacgcggtagatttctttctgccagtctacatctgcattgcccagcttgaaagtctccggagcattggcatgctcggcaaaagcctgacggaattcttcagtagacagtacatccatatactgatatacattgcttactgtcatgtttccgttatagttgaaggagggacgggaggtaccgtcaacacttcccttcttggtagtgatgatgatgacaccattggaagcacgcgaaccgtaaatagctgtggcagaagcatccttcaatactgtaaaggaagcaatgtcgttcggattgatggcactgatagaagtattgcttacgggtactccatcgataacaatcagcggatcattatctgccgacaaagaggctcccatacggatacggatggtaccgccgctacccggtgcaccattgcccggcacgatattcacaccggcaactttacccaccagagcatcttcagcagtcaattgcttacctttgttcagctcatccggtttcacggtcagcaaagatccggtcacgtcgcctttcttcacctgtccgtagccgatgactacaacttcgtccagtaactcactgtcttcctgcatggtaactacaatgagaggtttgtctgtcacggtgatttcctgtcctttataaccgatacaggtgacggtaagtacatttccggtagccgccttcagtgtaaaattgccgtccacatcggaaatagtacctatagaagtacctttaataagaatgttagctccgataaccgattcaccggtagcatccttcacatgccctttcaccacgatgtcttgtgctgaaagcgacagggatagtagtaatcccaacaaagggagaagtcccttgacaagtctaaaaatgtttttcataaggttattattataattaataaaaaaataattttctcttacctctgtacctgtaggggcgaatctctgttcgcccgcacacggcacagacttttttctataatcctcgtgtaacctgtttacccgataaaaaccaatacccaaagaaaatctattgttaactttaatttctacggcaaagttaaagcattactttcaggggaagtgatctgagtagatgggcaaagtagacgaaaatagaaattaaaaagagataaacagctgatattctgaagataaacttctccttttatagacaagaaaagtagatgagaggagatgtttgaggaaaataaaaggaggcaaaaatagcctcctcacttcgatagcacaccattctacaagaattcatcaatgcaatatagtgtttctttatattttaggtagtctgtattctaaagcaaattaattgcagataactctttcgtcaacgcttgaatacctttctgtattttttccaattgctgcctgcgaggtttatgaactccagctgcataatgccataactgacgttcattgattcccgtgatacgacttagcgcagctttggtaaagatattgctataatagttaataaaggtagcagcatcaatcttgaacttcaaatcaaactccccagataacaattcgcaaggatcaggattatcctccagatacagttcaatagcctccttcatattatcctcaatttcccgcatatcattacccacagtgataaccggggcaccttcgatataagcactgagattctttcctgcatgttcgacgataacttctactgttttcatattacctcctatttttaaatcatgaaaacaagggggacttatttcagccccgcttgtctcaaaatgctgtaataagtgcctttctcaacgcctttgctattgtgattcggtacaataaccactttgccgtctttctcaaacttcatgtgactacccttctgactccttagaacaaaaccgttctcttgcaacatagttacaacgtctttcactgatttgtaactcataacgctttggacttaattactatacaaatatagtaataatacgaatgctaccaaacaaattattcattattttactataatttaccagatatatcctatctttcagcctatttgctgcacggcttccataaattcatccttggaaagcaaagatttgttccgcactttcagacgatagttgtacactgtctgggcagaataatgaaggaagttcgcaatcttcccactatctgtaatacccaatctgatcagagcaaagacgcgcaactcgggggtcagcagttcaccttccttcggacagatgcgctcatcttcctgaagtaaagtattgaactgttctatgaacttaggatagagtttcaggaacacactatcgaacgtgtagaagaattctttcaactcattggcaacaaaagaagaggaattgacagtcttatacaaatcatccaattgcccggtcttgattttacgggcaagcattttccgttgttcttcctgcttgttgatatatagagagcacatattgaatacatagccgatatattcttccttcacctgattggattcctgcaacttatcattcagtgtatgcagatcagaattgatatgtttaagttcctcattcatagtgttcaccgctttccgggctacattcagccgcttcatctgatagaaaatgaacatcagagcaatcagcaatatgatcagcaagacagatgtcagaatgaccagggcaaccatttgtgttttctcctccttcaacttgttttcgtacgtccggctgataacgggaagcagttccgaaatctcctgcgtacgatagcgtgcattgcagaaggtggcatcttgcatagaacattctatataggtataagcacgttttatatctccttcctgaaacagaaggttcgctaacttccacaaggagatgtattccttcgttgccgcctgaatatcggcaatagccgaaatagccagatatttcttctgcaattcggtattgcccataaaggcataagcattggcgaggccgatagaaggaatggcaacactgtaccccttctcttcatgtgtcttgtagcaacttttcagtatctctatggcctcatcatacttttcttcatacagcaatttctcactcatcatcaacagataaccctgtgaaccgggacggcgcatactgataatagaatctttatattggtatgccaacccccggtaatgttctttcatctgatcagagaaagcataatccgccatcagcgtataaacctggtgatactgataataataataggaaacgccggaagcgtccagatcagcggacttgattccatccagtatttccagcccttccttatacatggccactcctatcattacttcggcaatattcagttcagccgaacgaatataaaggggattcttcatgcgcttggcaagttctacgcgctgattggccacccatagagccgagtccatacggtaagagcgatatttgccgaataattcgcggtaaagatcataacgctcctggtcggaatgagacagacggagttttcgttgcaaggcatctatttgttcctgacgtttcagggtgtattgaggacggtttctgatagacatatcaagttcacgaagcaaagaatcaatttcactgggatagatatgcagggatagggatgctaacaagactgccaaaaacacctttagtttcctcatacgaatttctttctcggtttaacaatagatcttcacggacaaaaatacggaataaatatctgaaatggaaagtttcatgagtcttttggcaggaattcaccggaaacgttgacgtacggttctgaataaaatgaaccatcatccgacaccctctatttttgaaaaaaaactctttccgttctttcagttctcactgactccccctattcatcggcattccggctgaaacttccagctttatagctgtttcaggtatatttcagccggaacgccgatgaacagggagtttaagataagctgaaagactgaaagaagaaaaaacacttaatgtattgaataacatctgaaaacaagcagtcttatgatccggaataagcaatgttatgaatgattagattgcttattatcatccacaacaagcaatctaatttcaggcaagtccgattccctcttttagcatctatatatcggtaacgttggatatatagatactacacatccgatatataggtgcaacgcatccggtatatagatgctgtgcgtccgatatatacagctaataatacactacacaccactccccccccttctgccgcaaggcacttgtagcccgtaacgcgtagctcgtagctgattcatcttctgcgacgtccgaacaagtcctttatcccatccagatcaaaacctaacgtaaaacgaagtgtctggtcgagcggattactttgtgccgtagataccagataagcagcatccaacgagaatacgctcatcttgaatcctgcaccaaaagaaaaatatttgcggtttcctttgttctcatgttcccagtgataaccgccacgaatggaaaactgttcgtgataagtatattccaatcccaaagaccactgtatctcctgcaattcttccttgaagccgccgggagcatcactgaaagatttgaaaatgcccttaatgggagaaatatcattataatcacggtccaaacgctcttcatactcttcctgcgactcatcttctccacgaacaggacgggtaggaaccatatacttattggcatcaaaactaactccgattgtattataatcatctatcgggaataacagggaagcacccaaacgtaagttagtaggcaagaactggctggtattaccactatcataagaaatcttcgtaccgatattggaagcattcagtccgaaagaaagcatacactcccgctgggcaagtatgacgtaattcgtataatagaaggcaatatcggcagcaaaagcagagccggcggaaacttcttcatcttccctgtacgccaggtcggaataaatgtatcgcaaggcaaccgcagcagagaaatgttcggaaagcatgcgggagtacgccacatccaccgccatttcataaggtttaatggtatatccgggagaattctcatcctgatatgctacgggtacttcacccaaagagaaataacgcaaagaaccgctgacagcctgataatctccgatacggtagtagcctgccagatatgccagatcaatatcattcaccaacttgcgcaaccaaggtgtataggaaaccgctactccggcacggctgatcgtaaacggatacttagccggattccagtattgagagtttacgtccggatctgtagccgcacccacatctcccataccaccgccacgggagtcaggggcaatacccaaagagttaacaccggtattaacgggattaaactgattcttgtcctgggcaagaaggtgtacggacaagaaagctatgagtaatagcaagatgtatttcttcatacgatattatttataatacgatctcaaatataaaaaacaaaatctaacttaattcccctccttttaggaggagaatttagttactcctttcaattgagatacttatgatttctaataacaatactaataaaacagagaatccccctgtttattgtgacaggataatgattttctgtgatttcgtactttcgcgactaccgtcggagacaatagatgcacgatacagataaacacccggtgccagacgttgcccgccattactgcacaagtcccattccacataataagtttgtccttcggatactcccttctccagatgtgtccacatttcccgtccggcaaaatcgtatacggacatacggaccgcaagcgtggaaccggggcgattgtgagaaagaacgaatgtagtactttcacgggcagggctttgtgtacaaataacagagaacagaccgggacgcaatccgcgaaccacctcaaactccaaagtctttgtagaggaattattcagcaaatcccaggcacggaacgacaacgtatgtttaccctcagtgagttcgggcacagaaaagtataccgttccccgggtatagtctcccgctaccggagtataataatcattcagattataagtcagcaccgcactgccgtcgatacaaagcgaaagatcatgcccgataccattgccaaccgtattgataccatccgcatcttccaattccgccacaaacaacggggtggtattggtttgtccaccaggactaaagtccggcgtattcagataaacggttatcttaggtcctaatgtgtccgtcagagaaacaccatcatccgttccacccaccaggaagcggtcgaaagctccgccggcttcatgagaatgaacggcatccagagcataaaggctcaataaaccttcctcatcggaatagttgatatccaacggcacgggaaaagtaaattcaaaccgtccctgacgaaccgagtcactgcccgagaaaagagttttactgcgctcggtataagtgaaagctccctcatcacgattatcaagagtcgtcacttcttccttactatccagcacagtaggatgcactgtaccggtaaagtcttcagccaaagctccttcgggagtcaggatacgtccttttactgtaatcttgctaccggctttcacctgcggatagacgctcgtttcttctgccacattcacccccgcaaattcgtctacctgcacctggtaatcgggatatgccaaagtcagggcaggatcgccaatcagagagaagttcagtttattcctatcgttagccaaagattcatcgcacttggaaagccgcatgatgtctccaaggcgcaaacgtttaccttcgggacgcgaaaaaatatgacggaggaaagcctgattcaacgtggagttttgcgaagcatacaccacccgcgatgtagtgagtaaagctatagcaccacctttagtattcaggaaagcctgctctccggcagaagtttgtatatcatcaaaacgggtaaagtcacaggtggcggtaatccatagaggaaggcggggagacgtcattttagtgatgtcagccatcgtcagcagattctctgccgcccatgcagaagtacttccatgacctgtatagttgactaccaacattcccctgttaaataactgcaagaggcgtttcgtagcatcaggataagtttctccggtagcggaagactcacgatggaaagcatcggcatagatccggttgacaagcagggaaggataattcctttcggtgtagctcgccaatatctcagattgagaaacgtgcaagttcttatctccgtcgtcagccacatagcagacggtatgcttccacgggcctgcttgtttattctccatataggcaatagtcttatctacagcagcttttgcctcggcagctgtgcgaacgggaaaacgcccgatgccaatatccagcatggcggccgtaagatcaccgccttcttcatcatcaagaaaaccgaaataatcgtcagttacataggaagaagtctcttccaaagaagtttccgattggtaagacagcagaaagttttcaggccggtaactcttccaggaagaagtcaacatacgattatcgtaactgcaatctccgaagaataacaagtatttgggacgttcagcttcattcgggaagcgatcatacaacatcttcatcagacggcgataagccgttccatctggtgtaccggaggaaaactcattgtagatttgcggagcggtaaggacaaggacggacaatccgtctttctcacgatgggcttgtgccagtcgttccgcctgtgccagcaggtctttccggtcgggagcaatgataatcatatccgtagcttccagagaatgcagattctggttcgcaaccccacctacgttttccactgtatcaaagcctcccgcttcgggagtgatggcaacaaactcacgcaactctcctgcgggaatggtaaatgtataggtgccattggcaaaactgccttctattctaccaatgtttgcaggattggtgacatcccacacaacagtagaagctgtggcaccggaaagaacgaacgttgtctccttatgaatggaagccaaagagcgaaaagtaagataaggagtgttcaacgtaagtgcacgcatgtagtttaaggcaatgtaatccagacgccccgatgtacccgaagggcgggtatgggtgatggttacaaccgtattttccgacttagtcccttgccaggaagcatttatcgttgcagaagtagctctggtataatattgattatcggaatcaatggatgccagtgtgatattgcctttcggttcaccattcactgaaacagagtagctggtagacgcatcaatggagcgggcggcaaagacagtagtcaaccatccggcagcttccggcacaatgcccggcaagttcaatgtataacttttcgtatttccggccacatagtcataatcttcataaagctgcctgccggtacctgcccaactatatgcatctttttcatagatagcaaaggaattgaaagtcgtcaatctgttggccgaagtctctttcaacgaagagaaaatttcagtttccatttccggaatatcctcccgatcagtcaggaagtaatacccttcatcagagtaaaagttgcgctcgcgaacaaagtaagtattttggctgtccggtgtccaggatacagtgccacgaccataaaacaacacaccatctgacaaacgcaacaaaggaacttcgggcaagtcagctgccggatgttcattgaaacgttgggacagcaaataaccgccataaccaaatacgcggactttttcgggtattgagaatcccatctttttcaattcggcattcgtgattttaaagactccggtatttctcacacttatcttcgtccaacggccggaagcaagaagtgatgttgtacaatcctttagagatacttcggataaagttgttttcagatttcgggtagctgtttcctcccctattctatctttcttaagaaaagaattcacggatagtttgaaagaattcagccgttgataacttccttcacgaaaaacaataggaacaaagcttatggagagaaaaccacgatgtgcggaaactttaatgaaagagtttatctgtggagatgccggcaagccttcccggaaagccacattttcattgggtagctgacgtaaactgtcgagtcgcatctctaatgccgccacctcactccggtttaacttctgatattccggaaactctatttccacctgataggtgaaggcacggaagtctttccccaaagggagttcacgcgtcactacgggaagcgtttgtgcagaagacaattcctgccagttcagcgtaatgaattcctgcgctgaaaccggaagaagaaaagcgataaagcaacaaagcaaccagcaacgtttgataaacatatcgtaataaattgactcaacgaatataaaagtcgagcaacttatcttctccgaggtatccttccaaatgctgtcctatctgtaccggacctacgcctgcgggagttcccgtaaacaacaggtcgcctattttcagcgtcataaagcggctgacatatgcaatgatctcatccactttgaaaagcatatccgaggtattgccatgctgcacttccttgccgtctatttccagacggaaatcaagccgctgcaaatcgcctcctgcctgctccaaaggaacaaaagttccgatagctgccgaatgatcgaaccctttgcaaagttcccagggattacccgcttcacggaacttacgttgcaagtcgcgtgccgtaaagtcgatgcctacagtcactgcgtcataataacgattggcaaagcgcggcgcaatgttttttcccaaacggcagatacgtaccaccacctcagtttcgtaatgaacctcatccgaaaaatcgggaataaagaaaggctttccgtctttcaatatagccgagtcgggcttcatgaagataaccggctctttattaactaacgtatgccccagctctttattgtgcagtgcatagttcattccgacagcaataatcttcattattcgatttcgttaaaattcaggcggttgaacatcaccgccaaatgagcatatagagaagtattctgaacaactatattttccggcacacggatacggaacggggtaaagttccatacagctttgatgccacccgctatcatggtatccgtaatgcattgggctatctcgataggtacagtcagcacaccgatgttcacatcatattcgcgcatcttctgctcgaattcactggaatggaagatcggtattccgttcaacgtagtgcctaccaattccggggtcacatcaaatgctgctacaatttccagcccgaagtgcttcaaaccggagtcgcgcaacaatgcaccacccaggctacctactccaaacagaaatgctttatgcatatcggtaaatccgaggaagtcttccagtacagctatcagcgtatcgacttcgtagcctacacgcgtacgcccggagatgttgacatacgacaaatccttggctatctgtgaagcatctatattgatttctttagatatctgtgtagaagagacgtaccgttcgccccgctgcttgagcagcttaacattcgacaagtaccacggcaacctgcgcaaagtaggctccggcactttcatgctatccttatattgaattgcctggttcgtggtcattttcttcatttctttcggttacgggtggacaaaaatacgctttttttggaaaagaatactccaacagaagaaagttaacataatttccacaaaagttttacttgtcagcaaagagggataacggcaaactaagggaaactcccaccgaatggaacttcaggcaatcgaaaccggcaaagactcctatccgtgccatatcggaaaacccaatcgaatatccaatctccgtataggggcgcccaccatatatcacgatggaacgaagatgcaaagcttcatcaaatgcttttcttgacagaaaaggaagatgtttcaaaagcagatatggagtataccaggagacattagcctgtgcccagcgggtattagtggacaaaacgtagttgtccactaaactaaacccggtatcgaaagaacgttccgtaaccaatatgcgggtagaagcgaaatgtttaaagtcggggaactgaagattctttgcatcaaagaatgaacctgcattcactgaccaatgcaggcgattgaacattccgaattcgattttctgtttagctgagaactgcatcaggtggtacgaggtaagataacggcttccgctcatagggaaagctctgtcatatttcaaggcaaatgtaggataacgggaagcttcatacacttttttaccttgcgacatgtaatagtagtgagccggagtgtactccaactcaaaagaagctttcaggatatcattctccggcattggtcggaaagcagtgttttccggaatattcggttcggcatctcttttgaaccaacttttatggatatggttatccagcatcttcctgcgttgccaggaaagtgaggaagaaaaaagtaatccgttagccggctctatcgcatggtcaactgtgaagaaggtattctcgtaaagcttcagatggttatgaccgaacagcgagctggacatactgttaatcaaacgggattctccactttccgaattataatcagcggacagaagacctccggaaagagataaataaccacggtttcggggagcataatctaatgtcagttctccttgtccaatccagtttttgcgggcagtggtataatagaaagaaggcacaaaacgaagtgtagaagattctgataacttcactcctgtctttagcttaactcctaaccagaagccatccactaaattatattcgggaatataagcggaaagaccaggtaaagttaaccatgcatttttattggaagttctgaaagtctttccccacataatggtattcagtacttgcccgaccgttgttttcttctcggatttttctccgggtgataaatctttcagcgcaatcttttcttctttatattgataactctgcacttcttccaatcgcaacggcacactacgaatagtggtccaataaagagaatcccgcttatcggcaagcgaatcaacctgagtatctttgcgtccgatccgtgccggacgttcaaatttatgtttctttggctgcgctactgcattggcagttacaggttttgtcgttttatccgtactggtctccggctggatatccgtttttacctctctatagtgtattgctgccagataagaagcctctgccttgaaacccattatatcaatggtagaagaagtcgtaatagaaaccggcagaaaaacagaagactgtacttccttgcaagtgatcttaatctttgctttcaacccggtagcgcgaacattgacatcagcagccgaaatgcaccacaaatcttctacaatgaacaggtctccttccagcaaacggttatcgtctttcttgggaatcacacggatcttatttatcatttgtccttcttccacaaagcaagcgtcaagtttgaaacgatagtacgagaaagcatttttatttaacggggaaactttaccgaaaagctcgggggtatagagattaatcgtagttatacccatgtccacccctatttcttctggaaaagagttcttattggctaataccttattattccagacattgggggcagtaaagttcacaatctgctgttgctccaagacaaacagctttccaagccattcttttgcatctttccgcacctctttggatagtttcaggacagcaggaatagcggtccctttaccggttcccttcagatacgtgccggcagtgtagctttttatctgagtgcgataataaggagcacgtgctatcgctttacgcatcactgcataggccggatcttcatttcccttggtgatgtttacttccggcaggctataggtacgttcggcaagcactatatccttctcataatcacgattcagcatttgaaaagtaaaggtctgggatatgaatcctaaagaagaaacctcacaggtatattgtccggcagataatttcgtttgaaaccgcccatgctcatcggtagttaaaccggacttcatttctctcagatagagagcggcataaggaaccggctttccgtcagtatctgtaacagtacctttgaaagattgtgcaaaagatagtatagtaaccaaagacaataggaatagccagatgattcttttcatatttcgtatatttgaagctaaatagcgttttctattagacgacaaaagtccaaaaagattgcaaagttccacgcaaaatattacttttggttcttaaaacagaacgaatatgaagaataatgattggaaagaacggttgaatgttgtttattctaccaatccggactatagttatgaaatggaagatgatggtgaacaggtaaccccggaagcttccaggcagaagttgcgtgttcaattggatcgcaagaatcgaggaggaaaagtagtcacacttgtcacgggtttcgtaggtacggaaaatgacctgaaggagttaggtaaattactgaagtctaaatgtggcgtaggtggaagtgccaaagacggagaaatcatcgtacagggagatttcaagcagaaagtactggaactacttaagaaagagggatatacgcagactaaaccggtcggataatccagaccatttgttttcagtaggcatatcacttctttcaaaaacagcaaatatgcataaaaaaacgaccgctacggaaactccatgcggtcgtttttttatatatattgagttgaattattcagctttcaaagtgaaacgcttgaagtctacaatcttcaattcagggtcagctgctgccaacacttctcttacggtcttcttagagtccatgatattttcttggttcagcaagcaaacttctttcaagaacttagccaaacgacctttagcaatgttctgaatcatttgttcgggcagatgtgcagccttctcagcagaaacagtagcaatgatttcttttgcttttgctatatcttcagctgtaatccaacctttagccatgttgctttccatgtggtcttcgctatccacgtgagccggattgatacctgctttcttcaaagcagcctcaacagccttctgtacctgttctgctttggtcttctcgatagcaacttcaatttctttctgcttcacttcttcagaaacaccatcctcgtcaattgcaatcgggttcatggcagcaatctgcatagccacttccttagccaactgctcttcaacttctttattgaaagcaacgatagtgcagagaccatttctattcatatgattgtaaacaacagtacttgcaccctctacagtcatgtagccgtcaagttccattttctcgcctgtaataccgctacggtcagtcactgcatcctgtacagtaccgttacccatcggcaatgctttcacttcatccaaagttttgcagttgttagctacagcaagatcaagaatatcctgagtcaattttatgaaatcagcattctgagctacgaagtcagtttcacacttcaacgcaatgattacggcaaagttaccggtagttttagccaaaacacaaccttcagaagcttcacggtctgaacgcttagcggcaacagcctgtcccttcttgcggattatttctattgccttgtcgaaatcgccttcagcttccgtcaatgcattcttacagtccatcatacctgctccggtcattttacggagtttggtaatatcagccattgttacagccataatatattttctttttataattaatattctaaatgataaaatggtaagatgataggatggtaagacgatattatcatcttatcattttaccatcttaccattcaattatgattaagcctcttcgtcttccttcaggaaagcagcagctttagctgcattgattgcttcctcgtcagatttgtcgagtcttgcttttgtagctttcttcttgcctttattggcaggagcttcaccagctgcttccatatctactttttcagcttttctttcttccaaaccttcctgcatagcagcgcagcaagcatccagaattacttctattgatttagtagcatcatcattagccgggataacgaaatcaatgttagaaggatcagagttcgtatcaacgataccgaatacggggatacccaaacggttagcttcgcgaactgcaatattttctttcataacatcaataacgaacagtgcagacggcagacgagtcaggtcagcaatagaacccaaagtcttgtccaacttagcacgttgacgtgaaatctgcagtacttctctcttagacagattagaatacgtaccgtcattcgtcaatttatcgatggtagccatcttcttaacagccttgcggattgtggggaaattagttaacataccgcccggccagcgctcgattacataaggcatatttacagcagaagctttgtcagcaaccacttgtttagcttgttttttagtagcaacgaacaggactttctttcctgatttagcaatttgcttcaaagcttcagcagcttcgtctactttagcaactgttttgtggaggtcaatgatgtggataccattgcgttccatgaaaatataaggagccattgcaggattccactttcttttgaggtgaccaaagtggcaaccggcttccaataatgtatcaaaatttgttcttgacatcttgttttttctttaaatcgtttactttcttttttgttttttctaaaccaaccgccgggtagtctatcaatccagagtcccggtagtttagatactaaacgctctttcagttgagagttgagagataaaagttgagaattaagcaacttgtccgccccaacatttctgcaactcttaacgtttactgaactggaatcttctacgagccttcggttgtcccggtttcttacgttcaacagaacgcgggtcacgagtcatgaagccttcagcacgaagagcagctttgtcttcagcattcatcttcaccaatgcgcgggcaatagccaaacgcaaagcctgagactgaccggtgaaaccaccaccgcaaagatttactttaatatcatatttttcagcaacacccagcttgctcagcggttgttttactacatactgaagaatagttgatggaaagtactctgcaaggtctctcttgttaatagtaatctttcctgtaccttcggttacgaaaatgcgtgcaattgcacttttacgtctgcctaatgcatttactacttccatatctattatttaagtaagtttatatcaattgttttcgggttctgagcatcatgtttgtgctcgctgccagcatatacgtacatattgctcagcaatttagcgcccaatttgttcttaggcaacataccctttactacttttctcaacagtctgtcatcaccgttcggtttagcctgcagacgagcaggagtcatttctctctgaccaccgggataacctgtgtatgacaaatacactttgtcagtccacttattacctgtcattttaactttgtcggcattgataatgattacattatcaccgcaatctacgtgaggagtaaagtttggtttatacttccctctcaacagtttcgcaacttttgcgcccagacgacccaatacttggtctgtagcgtcaacaataacccattctttggttaccgtagctttgtttgcagaaatggtcttgtaacttaaagtatccactcttgatttgttttttaaatgttactactaaaaaaatcttcattacggattagccaccccggacaaaggtggattaactcgctctgaattaattgcttatccttattagataataatcggcttgcaaagatacggattttcccaaaactggcaaacgttttcttcttttttttaaagaagctgactatcaatcacaagcaatgttaggacacaaaacaagcaatgttcccatgcaaaagattgcttgctttgcatcggaacattgcttattatatccggatagcccgttttaacgaacaatatcttcagggaatacaggcggcatcgttacccgcttccaggtttcatgataccaacagttcaattcattgccattcaaatctttagaaataaaatatttcagatgcataagcccgccttctcccatctcaaactccaggacattatctttattatccagcatgggcagatgaatattcttctcaatactttcccgatagctattgtccgtcagctggatataggtaccatatccggtgattatggcatctttgccgggaataagagtgaaattgacgatacgcccgtcatcgctcaataccttgaatgtgttactgggcttcaaagcaccgggaacatccggaatttcggatacatagtgacacagctgccagatacctttcaaatccgctggtttgaaactcgccttcttctgcgctgccgctcctgttaccgccaacagcactgctgccaacatggtaatgaaatacttcttcttcatgttcgtatatatttggttaacgtataggcatctgactgtcacaaatataagtaattattttaatattataacagtttattagtaaaaaaagagcccgcacaacaagattgtgcgggctacttcacttatttattttaagagttagaactctgcattacgcggcgtacgcgggaaaggtattacgtcacgaatatttgccatacccgtcacgaacagaagcaagcgttcaaaacccagaccaaaaccggagtgagggcacgtaccgaatctgcgggtatcaagataccaccacatatccttcatcggaatatgcatttcgtcaatacgcgtcatcagcttgtcataatcagactcacgctcagagccaccgataatctcaccaatcttcggaaataatacgtccattgcacgtactgttttaccatcttcgttctgcttcatgtagaacgctttgatttccttcggatagtcggtcaggataaccggacgcttgaagtgttcttccacgagataacgttcgtgctcagaagccaagtccacaccccagtataccggaaattcgaacttatgacctttagcaacagcctcttccagtatcttgatgccgtccgtataaggcaaacgtacgaaagattctttcaatacaccttgcagacgttcaatcaagcctttgtcaaacatatcgttcaggaacttcacgtcgtcagcacagttatccaaagcccacttcacacagaatttgataaactcttccgccagatccatattgtccgtaatgtcgttgaacgctacttccggttccaccatccagaactcagccaaatggcgtggagtattggagttttctgcacgaaatgtagggccaaaagtataaatagcgcccagtgccgtagcagcaagttcaccttccaactgtccggaaaccgtcagactggtttgcttaccaaagaagtcgtcatcataaatgatggaaccggcttcatctttcttcaaatcatagaggttcttcgtcgttacctgaaacatctgtccggcaccttcacagtcagatgccgtaatgataggtgtatggaaataaacgaagcctttctgatgaaagaaagtatggatagctatcgccatgttatgacggatgcggaacaccgcaccgaaagtattcgtacggggacgcaggtgagcaatctcacgcaggaattccagcgtatgacctttcttctgcaaaggatatgtattatcacaagtacccagcacttcaatctcacgagcttgaatctcagctttctgaccggaacctactgactccgtcaattcaccgttcacactcagacaggcaccggtggtaatatctttcagcatctcctcatcaaagtttgccaaatctactacaacctgcacattatttattgtagaaccgtcattcagggcgataaaattaacttgtttactacctctgcgggtacgaacccagcctttcacgttgaccatagcgccgaaatcttcgcgcttcaacacgtcaacaatctttgttctactaatcttttccataaatttgtgttaaacctctatattatataattactcaaaagagcccatgcgcaggtagtttacttcctgttcgctcaaatagcgccattcaccacgacgtaagcctttcttagtcagtccggcaaagaatacgcggtcgagtttgactaccttgtaacccagtgactcaaatatacgacgaacaatacggttcttacctgagtgaatttcaatgcccacttcatcccgtctaacatcatccgtataactgatagcatctgcatgtatttcaccgtcatccaactgaataccggctgcaatctgatccatatcagctttcgtcacatttttatctgtatgtacgtgataaatcttcttcttcaggaacttcggatgtgtcagtttggaagccaggtcaccgtcgttcgtcagcaataacacacctgtagtgttacggtccagacgacctaccggataaatacgctcatcgcaagcacccttcaccaaatccatcactgtacgacgtgcctgcggatcatccgaggtagtcacagtgtctttcggcttattcagcaagatataaatcttacgttcaatgctcaccatctgatcatggaacttcacttcgtcagcacgtttgatcttagttccgagttctgtaaccactactccatttactgaaaccacacctgccgtgatgaattcatccgcctcacgacgagagcagacacctgcattagccaagaacttgttcaaacggatcggttcattaggatccgtaaactgttccttatattctatctgtttcttacggctgtactttgcattcggatcataatccggcgtacgacgctgctggggacgaccatatccgcctcttccgccatccggattgaagcgtggacgctgcgggcggtcgccataagaagaacctccataagaagagccaccataagaacgttgtggacgatcaccaccatcaccgctattatagcgaggacgataaggacggtcgttgttataagaacgctgtccgtcaccactattgaaacgcgggcgttggggacggtcaccataagaagagcctccataagaaggacgctgtggacgatcaccaccatcaccgctattatagcgaggacgataaggacggtcaccaccactgttgtttccataagaaggacgttgcggacgatcgccgccttcacgattataggacggacgatcaccatacgagcgttgcggacgatcgccaccctcgcgattgtaagacgggcggtcaccataagaacgttgtggacgttcaccaccttcagcattagggttaaagcgcgggcgatacgggcgatcactgctgtaagcacgctgtgggcgttcgccactctcgctgttaaaacgcggacgatagggtcggtcaccaccttcacggttgtaagacggacggctgtaattgttttctctttcaaatctgttgcctgaattctcctcactggaagaatcgtcacgccaattttcgttttctgtactcattgttttattcgaataaaattaaacgttggcctcacggccattctattatcactcttataccttatattatatatgtatactatattaacaatcgccggatttaaaatgttggcttcattatacagctaaatttaatatttccagcttagattcctgtatatgtatgaggagtaattgcacgcaattctttctttatttcctcatctacattcaaaccttcaataaattcctttatagaagcttccgtaatagcctgattagtgcgggttaaggccttcaacgcctcgtacggatgcggatatgcttcacggcgcagaattgtctgaatagcctcagctaccacactccagcaattatccagatcgcgatagatagccgcttcgttcagcaacaatttacgcaaacctttcaatgagctctgaatggcaattacgatatgtccgaacggaacgcctacgttacgcaatacggtagaatccgtcaggtcacgttgtaagcgggacacaggcagtttcaccgacaaatgttccagaatggcacttgccacacccagattaccttccgcattttcaaagtcaatcggattcactttgtgcggcatggcgctggaacctacttcaccggctttaatcttctgcttgaaatattccatggaaatatattgccagaagtcacggttcatatcgatcattaccgtatttatgcgcttcatagcatcgaatacagcagacagattatcataattagaaatctgcgtagtatattcttcacgttccaaacccagtttttcagcaacaaaccggttaccaaatgctttccagtcgaactccggataagccacatgatgcgcattgtaatttccggtagcaccaccgaacttggcagtaagcggacaagacttcaaagtagccagctggcgttcaagacgatatacaaataccatcacctcttttcccaaacgagtaggtgaagccggctgaccgtgtgtcttggcaagcataggaatagccgtccattcttccgcatacgtacgaagttgcgcaatcagttcctctatttgtggataataaacctgttccaaagcctctttgatagacaaaggaacggaagtattattgatatcctgcgaagtcagtccgaaatgaataaactctttgtagtcatccattccacccattttatcaaactcttctttcaggaaatattctacggcttttacatcatggttcgttacgctctcaatatctttgatacgctgcgcgtcagcttcagagaagttacgatagatgtttcttaatgtttcaaatacgtttttgtctacgccttttaattgcggcaaaggcaattcgcacaaggtgatgaagtattccacttccacttgcacacggtattttatcaaggcaaattccgagaagtaagctgccaaagcatctgtttttcctctgtatcgaccatcaatcggagagatagcagtaagtaaatcaagttccatacgtgtatattagataattatcgagccgcaaaattagcttttttttctgagtaataagccataaaggggaaagaaagttaagtaaggaagttaacagataaaaaaatagccttacaacagcttgtaagaccactcattatagaaatcggatgtgggcgctgagggattcgaacccccgaccctctgggtgtaaaccagatgctctgaaccagctgagctaagcgcccttttgttcgaaagtgtgcggttttttagtgtgggcgctgagggattcgaacccccgaccctctgggtgtaaaccagatgctctgaaccagctgagctaagcgcccgtacactttcgtttcaaaagcgatgcaaaggtacagcttattttgagattaccaaaataattgcgaactattttctaagaaaaacatacagaaagatatatacttattgaaattcagcaatttaacaaaaaactttttttttcatcaaagaatcatccttataactcatgttttctcttcccggtttacgggaggatataacttcccggtggaagtaccttttctttgccagcaggcaataccactacagcagtagtacccggaggaacgattacatgtatattcacgatacggtcttgtttctttatatctacccgtatatcgccgtaaagagtaggtaccactgccgatgcctcgtttaacataccaagctgcggagctacccgaaaatgcttgaagccaggcttcagaggttctattccgcataacttttgactcaatatagtcaacggaccaccgctccacgcatggttgatagtaccacccccgaaaccttcggcacctattccccacccctcgaataaggtagtataaggatatgccatcattttagtataccggctacgcatacgctccaatgcaaagttcggttcccccatcacaaagagagcttccatgatatatttttccatatagggactggcatgatattccttcttgaaaaccttcagcaaagccttatatcttcccaccggagccaatccactcacaacggccatagcctgagagcggtcatcagtttcacctttatacgatctggaacgataagcggtacccgtccaataacgattatcaaaagcagcggcaatacgcttcatcatttcgtctacccgattggcatcgttttgtttatataaataaagtgcgaattctttctcagccttaagagccaaataataccaacaagtagtaagaacttccaggtcaacgtcagtcccccagtcgccccaattccagtcaccgggacggggaataggaaatccctgcgcatccaccttccacacttcatgcaggtattttttcattccctcataaatgtgaggaacaaatgaataatcaccactataaaatgcctgtgtataaaatccataccatccgacagaggcgagcatttgcagaggcaactctttacaccagttagccgatggaaccggagaggcaataatcccatccgcccgttgccaattcatcagttcataaatgcctttgacagccaattgccagccacgcgggtcgagcgcatagaaagcttcacccagctcgttcacttcatctcccaccactgcgcacgttcgcgatcagggcaatccatataattgtcgcgcatggtaatatataaggtacgggcactccgtttccagagctcggtaaagaaagcatcatcacaggtgaaagtcccctttatgtctgcattataacccgtttcccgatatttaagccccaatacttccactccggcaggaatcacatacagcatttcatgtccgttcatccatccaaaattttcatagctctgttcaccttcgcgagtaatatattccgcccgcacattgtttgcactgccacctgtataattatcagtcagcataccaatcttcaatccggcaggagctttcacatgcaagtaaggagtaatctggcaattatatggcagacggcaacgaatagtatccccggtttcattcttcaccacctccgggtattcccttaatccgctatccttccacatcggaatgggacgaggcaccaattttccaaacggcatttcattcggaaagccaatttcgatggccgggcctaacttacccccaaaagaaggttgattccagcctgccaactctttgcgtgcatcgaagcggatattactttcggacaaacgataattagggaatggcgcttctgtattctgataagcctgatacacactgcactgccaattcttatcactgacaatagtcacccccgatgcccgggcactaaaaagcagagcagcagtcccactgtttacatgactgaacccattctttccaaaatgccacactaacaaggcaataacattgtttcctttcttcagataaggagccatatccacccggtcataataagtagctccgggagccggaccacgcttcagcccaccttcaaaaacgaccagttctccattaatccacaaccagtatttagagtccacggcaatgttggcaatcatctcaccgggaacaccgggaagctcgattgttttacggaaacaaagccaagtgttcggagtactttgagaatgttcactgccaatccatctggattggggaagaaaatcgtctgctgcttttaattgtccagccaacatacaaactaaaacaataaagaaaagggggatttttttcatggttcaagatcgtattttgatttaacagataactgaattcacatcacttcatcgttccggcatcacctttctgatcaccttcgccggatttcctaccgccacactatcatcgggtatgtttttcgtcaccacacttccggcgccaataatacagcgatcaccaattgttacgccgggacaaataacagcaccaccgccaatccagcaatcctctcctatcgtcaccggataggcatattccttcggagtacgacgttctacataatccatcggatgttgtggagtataaatctgcacacaaggtcccaccaatgtatgggcaccaatcgtgatataacctccgtccagaaaagtacaatttgcattcacaaatacgtgttcacccagacgtataccatccccatgatcgcaatggaaaggcgggcacacaacggatgtctccggtattcccggtatcaggtcttccaacaatcctctgtaagcctcatcgtaagtactcaattgccgcatccttgccagcaacttcttggcatattcaaactttacctgtacttccggggcagacatatccgccagttgcgaactacgcattttctctacttcattcatatatttcaattaccagattatactctcaaaagcgtaattattccccctttcactattacactctccacaaaaatagatatttattccaaacagccaaccatattgataaaaagaaacagtaaatattttcaaaaaaatcgcagctatactatctggcatgcaaaaaatattcgtatatttattgcaatttaaacagaaacaagcattcgcaataaaactattttaaagacaaacagataagttcccacgcttttttcttttatcaagaagaaagaatcataataatactgctctgagaactggcagtacagtgtattaccttcaaattttgtattatgaaaatgacaaaattaatttatttgctgtaccattactagtggcttcatgtattagcgaagaagcacctattacagatgcgtctgatcacttcttcaaagtttccactgccaacccagacattcagcaaattgttttcctgctaaaacagaaaaatgattcagtggaatttacctctaagttcattaatgcttttaccaaggagaatcaacaggaatatgtcttggcaggcagatggaaagcaatcagctttttcatgaaatgatgcatgcttaccgagcttatcaagaaaccactgcgtcatacaaagaatcaactctgaatggagaaatagaagcatggtacgcacaatatctttacacgagcaacttaccagaatataaagacagtaagtgggaagacagggacaatacagacccccgtcgcagaagaataaaaagtttaacgaattacattgataataaagggaatttacttcccggagtgaatcgtaccgatttagaaagtaaaataaaagatgatatcgtccctactttccataagtatcactacacagcggataaataccccttcgaatataaccgaccgggattagagaattttaaatgtataaataagctaacaataaattgctgattatgaaaactatattcttttttatatgcatatcactttgtactacatatatatatgcacagacaaattattatgctgtaactaaaacattcaatgaaaatggttacacctaccaatgcgatgtggcagcgtcaaagacagtcacactctataacaagagtaacaaattactctttactactcaaagttacaaaaatacaggagaaactttctcacaaacagatgaaggtatcgctttactccaatatgacgcatggacacgagcagagcgcctttccattgtaaatactgcattttctgctagtgaaaaacaaagagtaaaaggccacgagctcataataacaatgtgcataaattcagataccggcaaggttgatgaggtcgaattttctttcatgaacttcggtacttatgccacaatccctatctctgtttaccgtaaaatcgaaacagatttaaaagaaaaggtctggtatatccctactgaagagggcaaaaaattaaattatatatactattggtgggcacaagagccccaataataagccttatagtcagtggtagcgccagaaaaaaagataaaaaaggaggacactctttctgatagagcatcctcctttttatttcctcttcagttacttatattcctgccaattcttgatagcaatatcttccaacttcagttcgcagaatgcttcgatgaaagcacttgccagacgagcattcgtaatcaacggaatgttatggtcgatagcaccacgacggatacggtaaccgttcgtcagttcacgtttcgtatgattcttcggaatgttgacaatcaaatcgaatttgtgttcggcaatcatcttcatcacgttgttctctgcgtcaggacgttcatcgggccagtaaacagcttcagtgcccactccatgagcattcaggaaagcggctgtacctgccgttgcataaatcttatatcctttattgaagagcatgcggctggactccagcaaatctactttcgatttcatggcaccggaagagaacatcactcccttttgaggaatctggaagccggtagcaatcatggcgctcagcaatgcttcggagaaatcatcaccgatacagcctacttcaccggtagaagacatatccacacccagtaccgggtctgccttgtgcagacgggagaaagagaactgagaagctttcacaccaatccagtcgatatcgaatgccgacttgtcaggacgagtataaggagcatccaacatgatgcgggtagcagtttcaataaagttacgcttcagcaccttagacacgaacgggaaactacgtgaagcacgaaggttacattcgattaccttcacctcattgttacgtgccaggaactgaatattgaacggaccggagatattgagttcctttgcaatctgacggctgattttcttgatacgacgtgccgtagcaaagtaaatcttctgtgcagggaataccaatgtagcgtcaccggagtgtacaccggcaaactccacatgctcggaaatagcatattccaccacttcaccattctgggcaacagcatcaaattcgatttcttttgtgttctgcaagaactgagaaattaccaccggatattctttagatacttcagcagccattttcaggaagttctccaattcttcttcatcatagcatacgttcatcgcagcacccgaaagtacataagacggacgaaccagtaccggataacccactttctctacgaaacctttcacatcttccagactggtaagctcttgccaagccggctggtcgatacccagttggtcgagcatagcagagaacttattacggttttcagcacggtcgatagaaagaggagaagttcccaggatgggcactgactgacgatgcagtttcattgccaggttgttcgggatctgtccgcctacagatacgattacaccgcgcggctgttccaggtcaataacatcgagtacacgctcaaaagacagctcatcgaagtaaagacgatcacacatatcatagtcagtagatacggtttcagggttatagttaatcatgatggacttgtaacccagcttacgtgcagtctgcacggcatttaccgaacaccagtcgaactctacggaagacccgatacggtaagcaccggaacccagtacaaccactgacttttcattcttgtaatagtttacgtcataaccctcaacggcgtacgtcatatacaggtaattagtcagttcaggatgctcggaagcaatcgtattgatacgttttacagccggcaggatgcccaactctttacgacgtgcacgcaccatcagattttctttctccatattgccttgcggctcgagtacgaaacgcgcaatctggaagtcagagaagcccagcacttttgcctgacgcaatacgtcggccggaatatcttccaccttattatattgggaaagcttcaacttatagtcaacaatgttcttcaacttgccaaggaaccagggatcaatcttggtcaggtcaaagatgcggtctatcgtatagccattctccaaagcttcagcaatagcaaatacacgcaagtcagtaggacgtgaaagctcacgatccagatcatcgaagtgcaggtcgttgcctacaaatccgtgcataccctgaccgatcatacgcaaacctttctggatgatttcttcgaaagaacgtccgatagacatgatttcacctacagacttcatgctggaaccgatttcacgggatacacctacgaacttcgtcaagtcccaacgaggaatcttacaaatcagataatccagttgcggagctacatacgctgaatacggagtacccatttcaccaatctgatcgagcgtatagcccaatgcgatcttagcggccacgaatgccaacggataacccgtagccttagaagccaaagcagaagaacgcgacagacgggcattcacctcaatcacacggtagtcgttagtttccgcattaaatgcatactgaatgttacattcgcccacaatgcccagatgacggatacacttcgtagaaagatcttgcaacatcttcacctgctcgtcagtcagcgaacaagtcggagccactacaatagactctcccgtatggatacccagcgggtcgaagttttccatgcttgccaccgtgaagcagtggtcattagcatcgcggattacttcgaactcaatttctttccaacctttcagagactcttctacaagaatttgtttagagaaagcgaaagagctttcggccaacttcaggaactcttctttatcctggcagatgccgctacccaaaccgcccagtgcataagcggaacgaaccataaccggaaaaccgatgcgttcagcagcagcaattgcatcttccatactttctacagcctggctgacgggagttttcatatcgatctcgtccagcttcttcacgaagaggtcacggtcttccgtatacatgatagcttccaccgaagttcctaatacgcgcacaccgtacttagccagcacaccgcttgtgtacaactcggcaccgcagttcagagccgtctgaccaccgaaggccaacagaataccatcgggacgttctttcttgatgatttcttctacgaaataagtggttacaggcaagaaataaacctgatctgcaataccttccgatgtttggatagtagcaatattcgggttcaccaacactgaactgataccttcttcacgcagagccttcaatgcctgcgaaccggaatagtcgaactccccggcctgaccgatcttgagtgcacctgagcccaagaccaacactttcttcaaattcttttccatatattctcttgttgtctattaagtttcttcctatacattcgggcacaaaaaaaatgcgttacccaacaaaggattaacgcattaccaaagaactaacaatatcttctcagagaaagagaaatcatcgactaacgaatgaaattcattcgaatacagattatatgtatctctttttccgtgttgttgcatcgttgttttaaaatttgtgcaaagtaacgacttatttcgataataaacaaatttagagcctgtctttattctctatatttatttaaaatagcaattgcctcctattaagctatttaaaagcatgatatagtaccgccattagtttcatcagctgaaacttgtagtttcatgccttgaaactatcagtttctcggtgtgaaactacaggtttcaaggcatgaaaccgccagttccacaccgagaaactaatcaccacttatagacttccgaataagactcaaactgaagtgcgtcggtaatgccgttctgagtaaatatatgcctgatatatcgttgaccttcaggcgtaatgaaacgctctttacggtagatccgataataatgcgtcttgccgaagtaggaaacaatctggtgccgcatatcggctgctaagctaagaggaacatcgtcaaataagtttcttaccccccatgccacacgtatcttctggataggcaggaaataggaacactgagaagaatcggcaggaatagctgccggactgagaattgtaatcaaaggtttatcagccgtgcaatgccgcgcagccaaacggcgcaagcaagtatctgacctggaacaatcgtccttgaaacaatgaataaacccttgagggaccgcttgataatcaaaatctgttttcatcgcgttttatattaagtatatttccacaaaggtaaactcttttttcaggaaaagcaacaagagtatggtttctctttcgcttctctaaagaattatgaagctaaagtcagagaaaagcgttacctttgtattcattttcaaagaaaaacataataaatagaataatataaatatgtctaaagagaaaatcatcctcacgggcgaccgccctacaggacgcctgcacataggacattatgtgggctcattgagaagaagagtggagttgcagaactccggtttgtatgacaagatattcgttttcattgccgatgcacaagcattgactgacaatgtggacaacccggaaaaggtacgtcagaatgttatcgaagtggcgcttgactatctggcgtgcggactggacccggcaaaaagcactatcttcattcaatctcagattgccgaactgtgcgaattgagtttttacttcatgaatatggtgaccgtaagccgcctgcaacgtaatcctacagtaaaggcagaaattcagttgcgcaacttcgacgccagtatcccagtaggtttcttcacctaccccatcagccagactgcggacattgccgctttcaaggcaacaactgtccctgtgggcgaagatcaggaaccaatgttggaacaggcacgcgaaatcgttcgtcgtttcaactatatctatggcgaaacactggttgagccggaaatcctcctgcccgaaaacgccgcctgtctgcgcctgcccggaacagacggaaaagccaagatgagcaagagcctgggcaactgtatctacctctccgactctgccgacgaagtacagaagaaagtgaaaggtatgtataccgatcccgaccacttgcgtgttcaagacccgggtaaagtagaaggcaaccctgtatttacttatctggatgctttctgccgtcccgaacacttcggcctttacctgcccgaatatccgaacctcgatgaactgaaagcacattatcagcgtggcggtctgggtgatatgaaggtgaaaggattccttaactccatcatgcaggaaacgctggaaccgattcgcaatcgtcgcaaagaatttgaaaaagacattcctgccatctatgacatgctgaagaaaggttgcgacgcagcacgcgaagttgccgccgctacattggatgatgtacgcaaagcaatgaagatcaactatttcgacgatgcggaactgatagcagaacaagtgaagaaattcagcggagaataaaaagcaatatcctctgttacgagtaacgccctggcctcccgtagaatctacgagagaacagggcgttccctttttaatggaaagactatatttagttagcagatttcactaataccacacggttcaggatcggttgaccaaatttgtctacaccaccaccggcttccacattcaagcgatcggcagcaataccgtaattcttaaccaatgcattcttaacagcttgtgcacgtttcaagctcaactccttgttgaatgccggagtaccggttgcagagtcagcataaccgtttacggtgtacgttgcattcgggaactgtttcatttgttctgccagataagacaggttcatgatttcacgcggagacaattcagcagaaccaatctggaagaatacggtacgcggtgcgatatccggatccggaacaatcacctgtgtttctgttacttcagccaccggctggttttcagcctgtaccagtgcattcttcaattctgcattctgtgcacccatcatagccaacttatcctgcatggcggccagttcgatctgagagatcaactgcggcatcggacgacggaaaccacgggcggggaaacgataagtcagaccaaccgtagcgctcaatacgccatcatatccgtgatcaccacctacttcaccatcaaatttatcttcagcagccattgcgctcaattccaggttaatatctaccgcattcgaaatacggaatttattgataatacctgcattcacagacaaagcttcgcgatgaggtttggagtaattgtgagtgaaaccggcacctacataaggaataatctcataaacacgatgctgattataacctccgaaaagagcattcagattgaacatcacgtcaccgtgcaagttcatatagtcaaaacgttgtttatagtaaccgtctttcagctcggcacccttcacgtagtcggcacctttatcataagtaaagcctctagcctgcaaaccgctatattgcagacgcaatcccaaaccgggagtaaaccatttaccgacagagatattcaatgtaggactgatacgcttaccaaaacttcctgcactatcattatcaccaaaagtagcttcagcaccgccgccgatagagaagaaccaattgctccagaaaggattggtgattacctgatatttatcctgtacctggataatttcgtattcgactacttcagtcttctgttgcgccatagcagcagaagacaaaccggccaaagccagtaacattagaatctttttcatataccttaaatagttaagtggttaatttaaattcattattgtaactgtttaaataacaccatccgaactaaaaggttttacgaagatagttttttttgttccgactgattatactactttaacgagcaaatagtttttcaatatcttcttctttaatcgttgacaatacggtacgtccatccggtgtataattcggagtaggacaagcaaacagattatctaccagattagccatttcttcattgctcaacacctggccgtaaacaatggcagcagccttcgccagtgtcagagccaacatcgtttgcacttcttccttcacgtcatttcccttttccattgccgtatgcaccatattacgcaccagctccaccggattcaacccttcaatgccggacggaatgccattgatcgcataacttcctcctcccagaggtgtcagttcaaacccaactgccgagaagtcttccatgatgctttccaacaccgcagcttccgaagcgggcaattgcacgatttcaggaaacaaaactccttgagaaaccccttgtttctgacgtatttgattcatataacgttcaaacaacacccggatatgcgcccggtgctggtctatcagcatcaaaccggattttaccgaagtcagaataaagcgccctttgaattgaaaatgctgcgcacctttctccactgccggttcgttggtatacaacgatgcagatggagaggatacagtttccgtctcctgaacatacggagtacgttcttcggacatatctaccgatgcaggtgcagaagtccagtccgtttcgtctacaaaaggttcttcttccataggcgtattcatcttactggctttctccagaccatcatacagtccttcccaatccactttcggccgggaatagctacccccaccactataagaggaagcggaagaagtcttgaacgggttgaagtctgaattataatgcaccttcggaggctctatcggacgagtctgatcgaatgcgggaatatccggcataccttccgtatcgaaatcaatggacggcacagcattgaatttacccaatgactcttttaccgctgcggaaacgatctgccaaattgcctgctcgttttcaaacttaatctcggtcttggtaggatgtatattcacatcaatgttggccgggtccacatcaaagtaaatgaaataggaaatctgttcgcctgccggaatcaattgttcataagcatccatcaccgctttatggaaatatggatgacgcatataacgcccgttcacaaagaaatactgatgagctcctttcttacgcgccgtctccggtttggcaacaaagccagataccttcaccatagtagtatccacatctaccgacagcagatgctggttcaacttcttgccaaatacggcaagaatacgttggcgaagtggcatcgcaggcaggttgaataattcggtatcattactatataagtagaaagccacttcgggatgtaccagagctatgcgttcaaattcagtaaggatattgctcaattccgtcgagttcgctttcaggaacttgcggcgggcaggtatattaaagaataagttcttaatggaaaagttacttcctttaggacacgaaacggcttcctgactttctactttagagccggctatcacaatccgtgtacccagttcctcattcgccatacgggttttgagttctacttccgccaccgcagcaacagaagccaacgcctctccacggaatcccatcgtgcgcaaggcaaataaatcggcagcctgccttatcttagaggtggcatggcgttcgaaagcaaggcgcgcatccgtttcggacatgcctttaccatcgtcaatcacctgtatacaggttttccctgcatccgtcaccaatacgtgtatttcttgtgcttcggcatcaatcgcattctctaccaattccttaatgacggacgccggacgctgaatcacctctccggcagcaatctgattggcaaccgaatcgggcagcaaatgaattatgtcgctcatgataattacaaattatgaattatgaattacaaataacgaataacaacaggttccatgatgctacattgtaattcgtaattaaattaaatgattccggtgcttatggcataccacaagtatatcagcaaagcaataatcaccagtatcacccccaggtgtaccggtttacgcccgctttccttgcgtcgtttcaagtgggtagtgccttctacgaactttccccggatatcttccggtgagaactccttctcaggcaacattcccaattcacgtttggcgctttcttccatcttcgccaacttctctttccgctcatccacatatatatatggatgattaaagccacgaggctttctcattgtgaacattcccatagcgcttatttatttctttttatattcatattccttggtgaaactataggcttacgatctgatttctgcaattgttcgccagcccttttacctctccactcaaatatatcttccttattcctcggacggatatagtcaaaccagacaaaaggaggcaacttatatttgtcagccggaatctgatccatcggatagagcgtaccattcgctttccctataaaagctccttgctccatacgcctttctttcagcaacatacgcaggaaactgccctcagaatagttcaatcctatcatggtactgtctttatcgtctatcggatagaagacaaccaatacattaccgttcacatccacctgacgcatatccccgccgacaaaaaagcctttcatctccttgcccgtcacttggttgtaatgaacagaatctttctgctccacagccaaagcctgattgattatgtgcgcccagtctatggtactgtcattcatatagactttaatttcctcacccaacaattgttgtgagccatgccataagataggatcagtatacatagtcatgcaagagtctttagaattatacaccaaagaatcgcatactgcctgaacatccgtacggtaagcacgtactttatgatacaccctcatctcacgaaacatggagtccgtatttatatgataggtaatcaaccgcagtgtatcaccatgcataaacaaactgtcaccttgtgaataatcaatggcaactgcacgttgagtggcaagtgcacttcccgtgatctcattgtagaaacaatagttacccgtgagcatattcctgttaatggtatcattcatctgcacattgtcaaatgcttcaccatatcccaaaacacgatcatagaaaatactgtcacccgtcagtttcttgccttcgttggtcagcacggaacgatccagcagttcagcctgctctgtagtggtattataaatacctcgttcggaatagatgtggttcttatcactcacaatatccgaaggacccagaatcgtagcaatcttcgtatcggtgctatatttcagggtatccgaagtcaatacaaatttcggattaaccaacttcacatcatggttgaatacggatattttcgtggccggactatattccccccactcggaagtcagcacattctcttcatcggtcagtgtaccgccatcgaagtaataacccagattatacaaacggtcgtagtttaaactatccgttgtcaataccgtattccggttaatcatgcggacattctcacgaagcattgccaactgcgacataccgtcataatacagataatctccataaataaagagcgtatccccctgttccatacgaacattaccgaaagcttccaccgaatttgtcttctcgtaaatcaacgcactgtcacagtacatatacatactgtcatgacgcagctttaccgaccggatcagaatctgaacatccggaagcagaattttatccgcctgcgcctcctcagcgtaaagcaaatcaacccgggttttcttcttttccggctgtttcggcttatcctgggcactcagcaaacagatgccaaacaggcatagaaggcctgtgagaaggaatctatgcctgttcagaaaattatttcttgtatttttcttctgcatacaaaaagttagtgtatcacccgggatcagtctttaatccaacccggatacttaaatgtacagttcttccaattttcgttgatacgcacgtacgtatgtttttgtttttcgcgaatccatttatccagcatctcgtcacggcgtttctccaatacaatttccttcaggttctgatagtcttccgaaatagttgctttgtgtccgttgatgcggcttttcagtttcacgattacacattcttctttaccagtcttctgcggaatcattgtgaatgcctcggagatttctcctactttcatcttatccaccactttagcaatctcgggcggaagttcctgcatctcaaactttgacgtattggtttgagggttaggtaacagaccgtgattgttacgtgtatccttatcctgtgaaagtacggaagcagcttcttcaaaagtaaacttaccgttacggatgtcatcggcaatagagtccagacgggcagtacctgccatcagcgcttcttccggtacgtggggcttcaacaagatatggcgtactttgatacggtcaccacgtttttccatcaactggataatatggaagccatattcagactctacaatcttggaaaccttattggggtcttgcaggttgaaagccacattggcaaatgcaggatccagataaccgcgtcctgtaaatggcatttcaccaccattgatagccgtaccacggtcgtcggagtacaaacgtgccaacatagagaagctttctcccttattcacacgatccgtatattcgcgcagacgactttttacatcttcaatttcctccaaaggaattttcggttgttgtgtgatgatctgcacctctacctgggtagggatataaggaatactgtcctgcggcaaatccttgaagtggcggcgcacctctgccggagtgattttaatctctcctaccagtttctgctgcattctctgcactttcaatccttcacgggcattctcacgcaaggcttcacgaatctgactggatgtcttattgaagtattcctccatcttttcacgcgaaccgatattggcgatatacatattcgtcatctggtccacacgctggatcacctcactttcagcaacttcaatactatcgagagcagcctggtgcaaaaacagcttctgtacagctatttcttcaggaatcacacagtagggatcaccatcaaatttacgtccttcgtacagagcactcatccgagcttcttctacttcagacttcaatatagcctcgtcgcccactacccaaactacttcgtcaatcacgttgtcttgtccataaacggcagaaccggtcatcagcgccaaggcacataaaactacaaacttaaagttcataaaatttttcattctgtgtatctaaactaattatatttaatctcattcttcttcaccgcctgctgatacaagtcatccttcacctttttcataaactccacttgtttcaggttcagcatcatatctttcactttagggcgtgcaaactcataaggttcctgctcgcccaccgaacgaaaatcgctcacattcaggaaataataaaacgccgtatcttttaattcgatatgacggttcttattcacataatcttctacttcgggtactttcaacggtatcagatcaagcacatctgccatcggtacccatttatcataaaagtactcgtacttcacggcattctgcaagctatacttttccagatgttctactgcatcttgcgtagctgctttataccaacgacgtacattgtttagttgtggtgcggtgagggggactttgatgaacaacccctgcatcagcggccgttccaacctgaaaagctctttattcttttcataatagtccgccaactctccctctgaaatttcattcgagagtctttggtgaatcaatgcctgctgataggtgtgcataatcagcgccttgcgataattctccacaagtttctcaatctccccgttatcgggaatattactctgcgctttctcatataataagacatcttccacccaattgcggatgtaatgttctgcgaacagtaaactatcatctttcgacaatctcgccggaagcgcagattgcaggtcttgccggtaaaggaaattgccgtccaattccaccagtggtgtcttccctttatggtcgtgttgctcgctacaggccacacacaaaaggatggagaggagtcccaggaaaaatattcgcattaccgattgatatttactttatttcaaggtacgaagataacggtttaatcggttgcatcagtgcttattaacggtttttaaaacctcttggtttatttcaaccttagcggtgctccgtaattgtgcaatccaacgctcctccaaatagttctgataatcgcctacaagcagtccacgtacctcttgataagtctccggtcccttcaccttttcacccagaaaagtggtaaaaggaaatgacgtcataggttcagttttcccctttttgaagatttcttcatctacataggcattatctccgggagcaaataaaccttgttccgcctgcacttgccgcgtctttgcattaaacgtcagccggatggcattctgccactcctcttccggcaaagatttcaggaatttgcgagcttgctttccaagctttttcgttgtagtatgtaatacaattcctttataacgggggactttccaatgataatccgaatgatgcttttcaaaataggccgccagtccgacttcatctgagggtacacgttcccaaatctcccggttactgatttcaaacagcaacattccattccgatactcttgcatgagcatacggaattccggatatttatcttccaggcgactatactcataatccagtacggacttcatgataaatcctttcagctggcgttgcacaccctgagggtgggaagctgcaaaagcggcaaacatctttcctgtatattccctgccgtcaagtgtaaacagtctcttatctgtctgcccttttgacagtaattcatccactccagtcttatctgccgtatattgatattcctttttcagtttttccaccaaagcctccgttcctctgtccattccgtaacgacggctctggcgacgcatgatttcatccttcactttttcaaagggcaggatttctttccgttcaatcgccttgacaatatgaatgccttgcggtgtaaaaaaaggtcgggatatctctccttgctttaatgcaaatacaacatcttcaaactcaacaggcatctgtaaccaacttacccaaaaagattttttttcatcagagaaattacgtacacactcatcaaagtccgcctgcccattctgcaatgcggcataaagagaatccatccgagcttctgcagaacgcagcacatgactggtaactgtttggggaagagacttaaagatatgacttacccgtatctgtccggcacgattgttagctttcattttatcatatacctgacgggctgcaagctctgatacagactcatccgtcaaataagcttttgccaactggcgacggtatccctccagttcttcacgaaaagcctgggtagtatccaatccggcagcttcggctgcagcgactttcagcttaaaattcacaaacaaatcaacatattcactcaatgttttctgttcgataccagcaagggcattattcttattatagatatattcgaactccgaacggagaatttctttcccgttaatacgcatcagcaccggatcttgctgagcaaaaactaccaatcccaggcaaaggagaattattgtcaatccacttcttatcataactattatcttagaaaagaacaatgtaataacggggaaacatcttttatattgcctcaacaccaaacagatgatgccttttctttaaacgaaaaatacccggaaaagtatttgttactccccgggtatttctatataaattgcctatattttattcgggacgactgtaattcggagcctcgcttgtaattgccacatcgtgcgggtggctttcaagcacgcctgcattagtgatgcgggtgaacttggcatcgtgcaactgctctatactacctgcaccacaataccccataccggcacgcaaaccgcctaccaactggaagatcacttcgtataaagttcccttataaggtacacgggcagcgataccttccggcaccaatttcttaacgtcattggtaccactctggaaataacggtcttttgaaccattctccattgcttccagtgaacccataccacgataagatttgaacttacgtccgttgaagataattgtatcaccgggagactcttccgttccggcaaccagcgaaccgatcattacgctatatcctccggcagccaaagctttcacaacatcacccgagtagcgcaaaccaccgtcagcaatcaaaggaacacctgtacccttcaacgccttagccacatcatatacagcagacaactgaggaactcccacacctgccacaacacgagtggtacagatagaacctggtccgataccaactttcactccatcagcgccggcttccaccaatgctttagcagcttctccggtagcaatgttacctaccacaatatcaatgttcgggaaacgcttcttagcttccttcaatttttctattacatagatagaatgtccgtgagccgtgtcgatgacaatcgcatcagcaccggcatccaccaaagcctgcatacggtcgagagtatcagccgttacacctacaccggcggcgacacgcaaacgacctttcgagtctttacaagccatcggtttatccttagctttcgttatatctttataagtaatgaggcctaccagcttaccttccttatctacaaccggcaacttctcaatcctgtgttcttgcaagatttgagaaacagcctccatatcagtggtcggattagtagtgataatattttcttttgtcatcacttcgtcgatatgcttattcatatctcttacgaaacgaaggtcacggtttgttacaattcccaccaaatacctctcatcatccactaccggtataccaccaattctgtattccgccatcaatgccaatgcatcgcctacggtagaacctctcttaatggttacaggatcataaatcataccgttttcagcacgcttcacgatggctacctgacgtgcctgttcttcgatagacatattcttatggataacaccgataccaccttcacgtgcaatggcaattgccattttcgcttcggtaaccgtatccatagcggccgttacaaacggaattttcaactcaatgtttttagaaaactttgtcgagagttcgacagttttaggaagcacttcagagtaagcggggattaacaaaacgtcgtcataagttaatccatccattacaatcttatcagcaataaatgacatagggctatgcgtttaaaatttattgcgtgcaaatatacggtttttcttgtttaaccacactatgtctgcataaaaagcttataacagttcactttttttaaaccgtatagcctcaaaatccctttatttcctttcggaatagtaatgaatcaaatgatgagcaatactatctcaattctcctcctccccggaggaggagtacccgaagggggaggtggtaggtgagaaaagaattccttatttatatggttcataggtatttcttgctttacctaccaccccgccctctgggcacccaccccctccggctcccccgttatcgggggagagcaacctccgacggaggaggggaattgagatactctatttacttaatattggaattatcatttagttcataaccaaaaagagaagagcgaataaaagttcatataccccataatcatctgtgtaacaacacacttggtgttccatcatgatcagtcgttgtgaaacacgagttcagtcctagtgggaggtaccttcagtcctagtgggaggcaccttcagtcgtagtgggaaataccctcagtcctgatgggaagtacccttggtttagcatagtgaatgaatcattgcgttgttcatgcccgaaaagaaagagattaattccaccaacaagtttatttattataggaatacggagcgtcttcaggctttactcctctttctttatcaggaacacaatccatgctcagtttaagttcaccgccttgcattagttcttcatgtttcaggaaattatgggagaaattcttcccattcagagtttccgaacgaatatagcaattatcctctgacgcgttttctgcatgaattacaaacttttttcctccgggcgaggtctgaccgttatcttcatctccgcaataaccttgcggaccggagttatacaaaaccttccggatcatggaatacgctccaggtccaatgccaggaacagccttcagtgaaagatcctccccactcggtggcgtcaaagttgtcacgccacttgccattggcatcccttgaccacatgaaacctttttcgggataaaacaaattgcgatagttctgtgcctttttatagaaggcaaaggttgaaaaagcaaatcaatttcttcataagcattaatagattttattcaaataatccagagtttgttcaggacgtcgactcatgcgtaaacgccaaaccaattcctccatattaatcgcctcaaaacggtcgtccaatcgttcggcacaccgtttggcagccgaggctccataagtatcgccttcaaaacgactccaagcatgcacacataccactgagaaactttcttcctgtgcttcctctttcagcttcgaagctataaagtcgggagaaccttcacgttcatgtattctgtcccagagagaatatttcaccgtaataaccggaatatcatatcctgccttattagtcacccagaagacttctccctcacctccggcatacggagaatattgcaaaacaacgatgccttccaactggtcattagcgtccacataaacttgataggcttctttggccgcttccgacttcacatccatagccattattcccaataacttgatctgatattgacgcatagaaaccgccaggcgttttgctgccactctcagattggttttccggttattatcctgactgtacgtatctacataataatagcctccgcccagcatctccataagcgagcaattctgtttctgcaagcccatcagattgttgaactgtacaggagccatcatcgccaacgtagcaaccggcaacccaaaagtcatcttcacatcttctgcctccggaacatcataataccgggaagcaaaatcctgcatcatccactgaatgttatcaccatcggaaaggaaaaaagaaacaaagtttttctttttcttgaaatcgatagaccggggatcgaaaatccggggcaacacctgttcccggcctttttcataaagcagggacagtaacgaatgattatagctccagtcgcaggggatcatcggatgtccgcttttggatacacgggctacaaattgatcttcacttactccttgctcccaaccgtataccggagcattgggttccagccaggcaagcacttcttcgagtaatgaaatgttttgtccggccccagcatctcccagttccttgttcaggttcaatacaaacagattgttcttgatggcaaattcgcgcaattctccggtttgcaccggcattatgactagtgcccttttactgcatttatttctgaattcacgccaagcatccactgtagtctttcgggtggcatcatatttcatcttataccccgctttctcaaaatactccttatcacgaatatccacaataatggaattgtaaacatgagaagcgacagatgccactacaccactttccggattattcttcacatcggtcaatacatacccatcgaacattccttttaactggacttttacaccatccacagaggagtattcattgcatgccagttcaagcccattctgcatgccttgttcatgtatccccatatcttccaaagcctgtctggaaagtttataagaagtctttccaccgtggtcgcacaaccagactgctatttcactcttgcctttttctaccgcacggttcgtcaatcccgccaaggactgacacaagagatggtattgcaatccgcgcattttatctgtctcgtctacactattacggctatccacagggattacacccacacaactccagtacttcttcggcttagccttcattccgggcatgtgatattttccctcatctgccacagattcagatatccatggactttcagagaaacgataaggaacactgccaatcgctttcagcccagcaaaaagcaacaggaaaccaataataaacttcatgattcaacttaaaaaaatacctattgaaaactgttatcctacctactaactataactgtatctcaaaaaccggagaataattatacttagcctgtataccttcacccagatctttgggcagtgcaccgatacggaagaagtacttctgtccggctttcaacttcttaccttcgtcagagttcaagtccaatgtcaatgtaaagactttattcgcattccggttattattctcaaaattgatatcatcgccttcaatattagccgttacatgtgccagattgaaagagttggacggattctgatccgattgagcaaacagggccaccttttcggctttacctgttctgtgaccatactgtaatttaaaggtggcaacaatagcgttattctctttcttcacaatgggctctttgatacggatattcggaatcaccctgaaatcaagcttattttctcctttgtcgaaacgatatcctttaatcgtatccagcttcacaaagttgccattattcataatgacatcgtaagtaccggagaaaacaagattgtttctgtattccccattcagcatgagcttccattgctgtaccttgcggatagcatatccatactctataacctgcacacaagctgcatcaccactggtaccaatttcctgctggatcaactcttctgtttcggcatcaattaccgcaccatatacttgtgcatccggaccatcaaaattatccagctcgcagcttaccatgaaaaccgctgcactgattccggctattatatatttaatctttctcatattctgtactaatttaaaagttaaggattctgaatcatttggttaatggcattgcgtggtacatcttcatagtattcggagattgaatagctattgggaccattcaggcttgctcccatagtggttttacgcacaaatatcagggaaggattcgtatcacgcaaatcaagcataggcaccagaatgtcatgagagaaattattcatcaacgtatgcagcactctccaacgacgcaaatcccagatacggatattctcaaaagcgagttccacaaaacgttcgtttctcacattctctcttgttaattctatttcattagtatgtgcggctctcttacgaatatcattcaacgcttttgctgcaatagtcttatcccccaacccgctttcgcagactgcttcagcataattcagcaacacttccgcatagcgaaatacgatataatctaacgtcgtcttatgatattgcgccggcatactttcactgatcatctttctcatgaggaaaccagacatggaatgagttccgtctcctggccaaaaaccggacacctgatgcttttcacctcctaaagaatagtaagtcttaccgtcttttccggtcactgtagtcggaacgcgatacagttctgttccatccggttgaatcacaccgccttgcatcacaatcttagtccctttccattcggtaccgggaagtatgatggaagcccacagacgagcatccttcgcttttttctcatctccataagcgatgccattaaacaaatcataaggggtatccttatttactttgatataatcagtataaccagtatcaaaacctgcattggaataattgtcattgacacgagtcttgacctttgcatccgaacggatacccggcaggtccgtataatcttcataagcatctaccaaattaagagctggagacattttaccctgtccctgtgtctggtaaggctcaataaagtaatttaaactactggcaaactcagatccttcttttacaatacctttaataaaaatagcctctccgtctgtttgattcggattaacaaagatactacgatagttctcctccgcttccttcggactggcaggattcggtttatacagtttatggttcgattctgtcataatagtcagggaagcatcaatgcaatgttgatagaaataggctgcattttcaggtttcattccggccaagccttttgtcacagcctctccttccatcggcgccagttctccgaatttggcaatagaagcagcatacaaagcggcacgagattttaaagccaatgccgcccatctggttgcccgtctgtccgaacgttctttaggaagttgtgcggctgcaagatcacattgctgcattacataatcccatgtatcatactctgtgctacgtggaaccaccaaagctcccggattggccggatcatactcctgcaattccttgatcagcggtactccaccaaatttttctgccaggtagaaatatacataagcagtcatgaaagcagcctctccttccagttctttcttttcactgtcacgaatatccagtgtagggatgatgcttttcagcaaattgatattacgaagcgtttcatagccatgattgaaataatccgcacgaataacgtatcccggtgattgctcaccccactgactttgtacagcttcctcacagatattggcataccataataaaccaatattccctgtcggattattgaaacctccttctccgctggtacccggcataaacatataatcttcaataggcaaatcgcgataaatagttgccataaaagcttttgccccattagggttattaaacagctcattgggagtgatcttgttattaggctcaatgtccagcaagtccgtacatgccgtaaacacagctgatagaccgataaccaaataatattttatatttttcatatctaacgttttttatattagaagctaacatttacaccgaagttgatagaagacgataacggataattcatcatacgattatcctgaccggctgttttctccggatccagtttcaaatccttcttcaaataagagtcacagaatgtgaagatattataagcatttacataaacacgcaggttttgcaagcctacatgactggcccaacgttgaggtaacgtataaccgacttcaagactcttcaaacgaagatagcttccatccaccgtattgcggtctgtctcctgtgcattgttccccatcggattgtagttggccacgcgggctgccgggaatcttcccggaatccagttgctgtttgcatcaaacggatcttcacgatgccatctgtcatacagataagcagatgaattaccttcccaaggtgcataattgcgcaggttgtcggggatctggatagaataacaggctgctccttggaataaagccatgaaatcgaaccatttccattcagctgtcagagtgacgccataattcagagccggcatattcaatccataatatttaggcttcatgtcattgccatctatgtatccatcaccatttacatcttgcaggtaatagtctcccggaagaatcatggtattacctctatcaccgctttgcacaggtgcattataaatctgatcatagttctggaattgcccagctgttgtatatccccagccgataccactccaacgtccttcggtagcggatttccaaacatcccaactactttcgtattcaccatgtatctggcgggtcatcttactgcgggcaaagttgaagtttccttgtacaccgtatgaaacctgaccgattttgttccggtgccccaaggtaaactcaataccttcggtacggtcggcattcagattctcttccggcagggaagctccgaatgtattggttagttggctacctctggtagccagcagcccatctctgtcacgacgatagacatcaaatgtgaagtccaacaagccatcccacaaggttatatccacaccaaggtcataagtacgtgtcgtaatccaggtcaggttcttattgacaagtgccggagtcaatactccattggtttgtgtaccatcaacgaactcgtacccctttgatcccattgtaaagccttctatgaactggaattcattaccggcatcaataccggtctctccatagctggctcttaacttcaagttactgacaaacgatatattatccttaataaaggattcctcggacattctccagcctgcactgacaaccgggaaaaatccccaacgactccccggagcataacgataagaaccattatagcgaaaagcaccttccaacagatatttgccttggtagtcgtagtttaaacggcctaaataagagatgtttgccgtttcgccatagccacctgaattctggatatttgtctgggagcctaagtcaagaataggtttagagtaaatctcatactcgcgggtagcagaaacattatcattccagccatgattcatttcgtacatagccatcaaagaaatgttatggtcgcgcgcaatagtagtactataagacaattgtgcctgaatattaagattattaccattattcatattcacatacaaactgctcgggtcattaattgtctttgatacatcatacgattcattctgcgaattataactgtacaactggtagagttttctctcatgcgaggtacggttatcactggcatcatatgaagtcattaatttagctttcaatccctttacccaaggaacatcataggtcaatgtggcagttgactgtaaactacgtcctctgctggtattcataccggtgagatcaccattcattgctgccactggattgtccaggaaaggataagctgcattgtagtattcggaattgttattggcatacactccggatgtcggtctcatcaatgtagatttgaacagtaagtcaaagactccctggataggagcattcgtcacgtcatatcttccggaaacattaacttccgctttgagatacttagacaactgggctgtaaaattactacgcatagtatatctttcgtaattgaaatcgcctcctcgtgtcaagtcaccatcgtgcgcataaccgaaactggcataataggtcatcttatcactaccaccctcaacagaaagagtatgctgctggctacctgcactttttttgaatacagcatccaaccaatcggtactttcatagccgggaccaccggcctgccatttggcaagttcttcaggagtggtagtaggaccggtacccgcattcattgacaattcattggaaatctccgcatattgggcagcattcataaccttcatcatggaagtggggaaaatagctgtgaatgaaccgttgtaattaaaacgggctttaccttttcttccttttttggtggtaataattacaactccattggcggcattcataccatagattgccgcagcaccatctttaagtacagaaatattttcaatatcttccggattcaagcgctgaaattcagaaccaccgtcgccactgtcgcggacaacaccatcgattacatacagcggactaccaaagccacgaatttgtaccatagaactgaacgaacctggttgaccgtcctgttgacggatctgtacaccggcaatctttccctgtaagctctgagccacactcgtgcttttggttgtcagcactttgtcaccactaagagtagaaatagccccagtcagtgtctgtttcttctgagtgccatatcccacaactactacttcgcccaaaacggcttcatcttcctttaacaccactcttactgagttttcggctcctactttgacttcctgagtctgaaagccaatataagatatctgaagaacagcgttcttctcaagattttgtagcacaaattcacccgacatatctgccacggcatttttattattggctcctttcactacaacggtcgcaccaaccagcggattcccttcctggtctatcacctgtcctttaaactgtgcatgttgcgcatataccattgtggtacagagtaacatgaggcatcccaacaaggtgcgtgctaaatgattcatgtgttttatcatataaaaaaagatttttaactttacaattacataaaagatttctaaatgttacgtttccaacttttctcagtggatacattctttgggtcatttaatcttttcttttaacataggcattttcttttaggggttaacattcttattttattgttacgtaacgaaagtcatgtttatctgcctcctgaagtaccggggcttccagacgattgtcaataatacgatcccagtacggactcagatccaacgtttttccctcttccaccacaaactctttaatttcgatttctctcttttcggaagtggaaagtcctgcaggttccgatatcactttattgaaactgatccgctctttaccatatttcttcgttattttgaaagtgatggatttcttctgaggatcagcagttactactccccaaaagttaggataaaacagagggatgctgattactttatcatcggccactacaggagccagacgcaattcttttcggggaatgttaacgccagcaccagccaatacatctgtagagaaccaagttaccggagctgtcatataagtaatgtcactgggattccacaagttttgagtccatgtccagcctttacgcagatgtactaattggatgtgcttcataatatccatggcatcttcataaaatcccgcctgcataccggctaaagcagtatagctttccagatagaagggccagcattgtgatcccctattatcaatacctcggttcagattgatatcccacactttattagcgtaataatcaggagacttggaaagagaaatcttgcattgagatatcatagatgccttcactatatccataggatatacgtctccccatccgcagtaacggctcaggaactggcctgccaactgtcccgtaaacaatacattatccagtcttttggaaccatccggttcacagccgtaggcaaagaaacgtccattccacaacttctcaagagcctctttctgagaggtagcaaactgttgttgcgcctgtttcacgatgctttcatctccaatagcttttcctatagcttcgtaagccttgagtgtagtcagccatacacctgcatagtaagaatacaaagggggatgagtaaaatcatcatacgtagtagggcctacaggtattgtactgccttgaggcatacgactatataagaatttcatggctcttttaagtcccgtaagatgtgctttcaagtagtctgtatcaccagtctgctcatagtctttaacaagttgtatgatccagccggaagcattgtccaacatccaacccttttccgttggtacacggccacctacggtacccatacctacatagtaatgtccgatgaaatgaagtatataaccttccggatccattgcatctgcaaaaatatccatctccgaacgatccagttgagtgaaaaatttctggtaaaaaggatgtgaactcaaacgctgatccattgttccggcaaagccgcccatggctccttcattaaccataacatcacctcctttagtaagcaccatattggtgtaaatgacatatccactattaataagcttaaacttataccagtcaggaaggctactctcaagaaccgggatttgccactccgtagtctgtcgggcaattcttgccctattggatacagcatagctcaccatagaattcatactattaaaataattatgatagtatttattgtagtcagccccacaaggccagtagctaccgataggaagggctgccgcatcaatctgcagttcaggagcataccatgccagcataaaacgaattgttttcttttgacctgctttcaactgtgtcttaacagccagtgcagaagcagaagaagtttgagattgctccgtcagtacatttttggttagtgaagaagtgaattctccattatttctaaactgatcccatgcctcagaattcgaacgataagctggaagataagatacattcttttcttcttccactgcaatcaccacttgattcacatagttctgaaaagtcaatttgcgaggttgcaagctatctgcagcatattgtatcaaccctttcaggcttcccatctgataaggttctacataggttttagccttctcacgcaacggccagttttctccattatttatattagctctaccttcactcaatagctggccattgtcaaaaccttccaagctcttcggatcattaaacaatccgataaaatcttcccaggaaaacgctaatgcagcttccatgtcctcctgagctatgagatcaacctcaaaccatactaccggcaaagaggaatctttcacattgtgcggcaccaatcctgaataggcacgaattacaggggctactttcaaattattatccgcataacttaattctgctgtaggaaataatcctttatattgagtatgttctactcctttcattccatacaaaacatgattatccctaaccagacgaacagcttctttttcatttcccttccgtgtccataaagagaagaatgaatgctccgaacgtttaataggagtatgaatattattcattcctatcctggtgaatttgccacttggagcgaaatttatattgcctactccaataccacccaagggcactccgcttacgtcttcatgatcttttaatgaaaggtaagtatagttggtttctccacctaaaactccactttgaagactgaatttggtattggcttcatcgacaccataattgttctgattttcttcttgtccatacagtgcaaatattcctgtaagacaaaaggctaaagagacaaaggttcttttactcatacatgtgttttttaagattaataatagaagttatgaatctacttctgctttcgttagcgttcgagtgcaaaaatagatgctgatagattacaatagcggttacattggggttaatcgagggttaattttgagaggtattttattaattacccgattaatttaagaaaatctatgctctatggcataaagttacagacataaaaagattacctctaaatatagagacttataaattggaaacagtcctttttttctgattattgaaaacttgtccttaagtcattgtgtatgatatcagagtaagaatatgaatagttattacccatacttttattatattctgcaatatacagataatatttcttcattgcctgatcttccttcttcagcttatggcaggcattcagcatgtaccacaaagctgtatcattcaaagaatctactctcagccagatttcagccaattgagcaacctgctcatacgcagctttcatatatagattattcaactcaatcgtcaacatctcatgcaattcatattcttgttcgctcttaaaggaatcaaacatagagtcgtcaatagactttaaaaatttccctcgcgacaaaattccgatcagtgattggttgacttcctgagatgcatcactttgccggattttattcatttgttcaagatattgttgataatcgcaatagaaagcctccgacaattggatagaatagcgactattagtatacaccaattcaataccttccagatcatccagtatttttcttaatcggtttattgtaacgcccttcagatttttggcactactcaattctttttctggccataacaacccataaatataattcgaggtaataccttccttattacctaaaccattcagaaaagtaagtaagaacagttgctttatcttggaactaaacaaatgagtgatatctcttccttttttatctattatagtgaattccccaaacagatacaaagcatttgcctgtggtgactttttattttcaacctgagtgaaagtttcacgaacaggtgtgactttaggtatcggttgtttctccttcttcctcttcaagtaatacgtaatgccaacaatcaatatcagtacaacaaccattacaaaaatagcagcacgcaaagaaagtccttcttcaacagcatataaaaacaatgcgttctctgcaatggcaggtgccgacaatgaataaaaacgtgtaacagaagattctccgccacgttcattaaattcttgcgtacaacaataaaactcctttgtttctttattataataaagatttgcattagataaaatggccttcgactccataggaatagaattacctaatacttcataggaatcattctgcaacgagaacttataaagctgcaaatgggaagaggcttcctgcataggataacacaacgtatagaaagaagctccatcatcagataaaagaaggtttcttaccggaacaatctgagttccatcataagagaagtccctcactttctgcacggttgaatctttcagatttatcttatagagatcataatagtatattttcccgatactctgatccccactactattcccagtaccaccaaacaaaagcaactcattagcattcaatgctcccatagaagagaaaaaacgaggggctacaaaatcacctttcaatttaatagtattccatgacttttgatccaaatcatatacttccaatgtattggtatatttgcgtgagccaaaacctccaaaaatatagaacttattacgaatagtatccagataagaagaatggtggtgtcgctgtgaaggcaaaaatttatcaccaaccttttccacttctcctgtaagtacattcaaagcacaaatggtacaaacatctgcatgattatccacttcatagatataaacagaatgagaatccggatagaaaaagtttgttcccaagtacatcttcatcggcagggattgatgcttatacccttcccagatattacggcggatatccagagtatataaagaatcgctgttaaaatagacaaaattgccggaattggaatcataattataccccgccgtactctcagaagcctgcgaatgaagcaaattccaataataggatttatttattaaccagattggattaattgcttttcctctgatctttccttgtttgtcatgaacaagaataccggaactttcattcaaaggaaaattgatttgttgattcatgtcggagattactaaattccggattgcaaaagaaggtatttcttcagaaaacttactacttccgaacatgatggtaggagtcaattctccggataagcctaattttcctgattgatattgtcgcttatcaatagtaaggcatacagaatcttcttttaaaaaaaaggagatttctatgggtatccaacgccgaggaccaagtttcttattacatagagtatctacaataagacattcttttgcctcaatattaaatttcagataactccgttcgtcattgtcataagagaaaacaaaactataaatatctgcattttcacgtttcagatcttttaatcgaaatatataaccgaaagatccataatcctgaatagccaaatcataagatatagagaaatgacctttaaaagtcaaaggattttcatcaaaaacagaatagcttgtcttttgtatagtttcagattcataagtattaaattcaagaccttgagcattagctcgcaagcataaaaagcaaagtagcaatatgaaagatcctatatatctcattatcatttccttgtcatgtagttacttatttattaaccagacaaatatataacttaaaaaccggactcatgaaacataagcccggttttaacaaaaatgcattcctatctttaattcgccatctcagaaataaacttaatgcgaaccaaccttacttcttcttccgtgaaatcatcacccagttcatcaagtgcgtcatctatcttgtcagtagtagattccttgaaataatcatagatatccaacatgtggtcttcgtccataatctcatccaggaagtaatcaatattcaacttcgtaccagaataaacgattgcctcgatttcgtccaataaatcaccaaactcaatgcctttggaaagtgcgatatcatccaatgccaccttacggtctacagcctgaataatagccactttcatcttggatttattagcaaccgtacgaacacgtaagtcttcagggcgttcgatttcattctcttcacagtgacgttttatcagcttgcaaaactcctcaccgtagcgtttagccttacctgcacctacaccgggaatgttttgcaattcatccagtgtcaccggataaatagttgccatggcttccaatgaaggatcctggaaaattacataaggcggtacttccagtttcttggaaagcttcttacgcaaatccttcagcatggaataaagagccggatcgacagcgcaagagccaccgccccttgccggagcttcttcttccacttcttcgaaatcattatcttcggttatcttgaacgatttaggatgtttcaggaacttctttccttcatccgttactttcagcaaaccgtaattttccacatctttactcaggtaaccagcaatgagcgcctggcgaatgacagcattccatgttctgtcttcttctcccataccggagccgaaagcttccaggtcttcatgcagatgcgcctgcacttcggtagtttcacgtccttgtataatgtcgatgatataatctgccttaaaattttctttcaccgcgagaatagcctctatcacggtacacaataattcttgagcctccacttgttttttcgggtttaaacagttgtcacaatttccacagttctcttccatatactcttcaccgaagtaatgcaacagcgtctttcggcgacatacggaagattcggcataagcagcggtttccagcagaagctgtttaccgatttcctgctctgccacaggtttaccttgcatgaacttttcaagtttctgcaagtctttattggtataaaaggtaatacactgtccttcgcctccatctcttccggcacgtcctgtttcctgataatatccttccagacttttcgggatatcataatgaataacataacgcacatcaggcttgtcaatacccataccaaaagcaatggtagctacaatcacatctattttctccatcaagaagtcgtcttgattttgcgtgcgtgttgcagaatccattcctgcatggtatgcgcgggcattaataccattcgcctgtagaatctcagcaagttcctctacctttttccgactcaggcaataaataatgcccgacttttccgaattattcttgatgaacttgatgatatctctatctatgttattggtcttgggacgtacctcataatagaggttcggacgattgaacgacgacttgaacacttcggcatcaatcatacccagattcttctggatatcatgttgcactttaggggttgcagtcgcagtcagagcaatcaccggagcttttccgatttcattgataatagggcggatacggcgatattccgggcggaaatcatgtccccattcagagatacagtgggcctcgtctacagcatagaaggaaatcttcactgtcttcagaaactctacattttcctctttcgtcagcgattcgggagctacatacagtaactttgtcttaccgctgaggatgtcagacttcacctgatctatcgcacctttattaagagaagagttgataaaatgggcaataccatcttcttcactgaagttacgcatcgcatcgacttggttcttcattagggcaatcaacggagaaatcacaatacccgtaccttccatcattaatgacggtaactggtagcatagtgattttcctccacctgtaggcatcagcacgaatgtatcgttacctgccaacagattttgtatgatagcctcctgatttcctttaaatgtgtcaaatccgaagtacttcttcagctggtctgtcaaattaatcttcttccctgccatgattcattaggttgttttttgagtgattgtttaacatctcggttagctattctttttgtaagaactctaacaaagttataaacaacttcttaaatttcaagcataatccaatgaatatttttcaataaaaaacaaaatagtcagtttcgcatacccttaccatttgattttaagcagtttgcagttttgcaatgtttgctttttcaagctggtgtttagcataatccaacgtcacttcaaagtgatccttgtgttcggacgggatttcgaacatagcatccatcatgatggtttccacaatggatcgcaatccacgagctcccaacttgtattccacagctttatctacgatgtactcaaagacagtagcttcgaatgtcagttccacattgtccatctcaaacagtttaacatattgtttgataatggaattcttaggttcagtcaggatagagcgcaaagcggcacgatccaacggattcaaataagtcagcaccggcagacgaccgatgatttcaggtatcagaccgaatgactttaaatcctgaggcgcaatatattgcatcatattgcttttatcaattaccgcagtgttacgcactgcactataccccaccacatgtgtattcaaacgctgggcaattttcttctcaatgccatcgaatgctccaccgcaaataaaaaggatgttctttgtgttcaccggaatcattttctgatcaggatgcttgcgtcctccctgaggcggaacgttcacaacagaaccttccaacaatttcagtaaaccttgttgaacaccctctccgcttacatcacgtgtaatggaaggattatctcccttacgggcgatcttatcaatttcatcaatgaacacaataccctgctcagcttcgggaacattgtaatctgccacctgaagcaggcgggtcaaaatactttcaatgtcttcgcccacgtatccagcctcggtaagcaccgtagcatctacaatagtaaaaggtacgtgaagcaatttagcaatggtacgtgcaagcaatgtctttcccgttccggtgctacctaccatgatgatattagacttttcaatttccacatcatcaccgccgtctttttgcaacaggcgtttatagtgattgtataccgacacggaaaggaagcgttttgcatcatcctgtccaatgacgtattgatcaaggaattcttttatttctaaaggtttcggaagttctctcaagttcagtttcgttgcagcgccactcctttttgctccacccagcgcctcctgagtgatctcataggcctgagtggcacaactatcacaaatgtagccgttcattcccgtaatcagaaatccgacttcatcttccgtacgcccacagaaactacacctgtttttgtttctttttgagtctgccatatttattttttaatcaacacttcatctaccatgccatactccttggcttcctgtgccgtcatccagtagtcacgatcagagtctgcccaaactttatcgaaaggagtatgagagtggtcagcaataatagtatacagttcctttttcagcttctgaatttcacgtgccgtgatttcaatatccgaagcctgtccctgtgcaccacccattggctgatgtatcattacacgagagtgagtcagcgccgaacgcttgccttctgcacctgccaccagcaacaccgcagccatacttgctgccatacctgtacagatagtagccacatcgctcgtgataaactgcattgtatcatagatacccaatcctgcatatacggaaccacccggtgaattaatataaatagagatatctttacccggttctaccgaatccagatacagtaactgcgcctgtaaagtattagcggtataatcgtcaacctgtgtaccaaggaaaatgatgcgatccatcatcaagcgggagaaaacgtccaactgggttacattgagctgacgttcttccaggatataaggatttaaatacccggcttgtgatttaatcacatcgtccagcaccaagctattcatacctaaatgcttggtagcgtattttctaaaatcatccatattactttcttttttaggtttagtaaattgaaatgcaaagaaacaaaaaagaacacagagacacaaaaaaacacagagttatatgatataagactctgtgtttcttaatgtttttaaactgttttcagaataaaaaagcttattcaaacatcttattgaattcttctgcagaaattgttttgttttccagcgtcacctgagacttcaaagcagaagccaatttagtttcaacaacacggtttaccaaaccttcaacgctttctttcttcttcagcatttcttttgcatagttttccagaagatcttcaggaacactcatcataccatattgtgcaaactgtgcacgggtagcttccttagccatattgactacatcttcctgttcaaccttgatatcgttagctttcaccaactgttccttgatcaggtgccatgtcagttcttcgatactcttatcatagttgtcttctacaaatttctcgtctttgtcctggttgttcatgcgcatgatgcgtttcagcaatgcatccgggaattccaacttgccaactttctccatcaacatcttacgagcgtcaatcagaaatttataatcagtgtctgctacaaactgattagcaattacctcttttactttagcacggaattcttcttcagtcttcacaacatctttaccacatacctgatcgaaaatttcctgagttagttcaccggctacaaaacgagtcacttcttctacctgatagctgaagttagatttcatttcagcggcttcttctttatcgatcttcaacaaagaagacagttcagttgcattaccatcccatgcagtataaggattgaatacgagtacatcatttacttttgcattggcaaagatagctttttgctcatcgttcttcatataagacggcatcattacagcagcttctacctgaatgccaccttctttggtattgccgttttcatccaattcagccagcaatcccttcagcatatcgttatcttcgtaaacgtccacttgttcgtacttaccattacgttgtgtgtaagccttcacctgattgtttaccatatcttcggtaacgtcaatcaaataatagtcaactttatctttagtgcttacttcagctttgaattcaggtgccagagcaatatcgaaaaggaattcgaattcttccatagtatcgaagtcgatatccggttgcttatcttcatttggcagcggttcgccgagaatagatacattattatcttgaatatacttatatacagcttctgaaagtgccttgtttacttcttcagcaataactgatttaccatacattttcttcaccagactcatcggaaccatccccggacggaaccccggaacctgagctttctgacgaagttttttcaatgatttatcaactttttcctgataatcggctttctcaagcttcacagtaagcagagcgcttactttgtcaatgttttgtaatgaaacgttcattctgacaattatttatttgatttatactttattccaatctcaaacgagggtgcaaaattagcgttattctttcaattatcaaaaaaacattgctgaattatttctttataacaaaaggagagattagttatcactaaatcatactctctgtattgtttaatgaaaacataattatgattattctccataagctacagatcgtaattagataaggcatttagcttcagaatcgaaagaaaaagcaaaaaaaacagaaagaaaatatggaaataccgaaataattatgtttctttgttgcggaatggtaatacattagttcttagattttcagtacatggtttttacttccgtttttcatgaaacgcttttgtaaactctctgttgttgtgatccttttattatagttacccttccaagagagttttattcatttatttattttacattttcattatgaacatttacgtaggaaaccttaactacaaagttagggaatcagacctccaaaaggtcatggaagattacggtgctgtaaccgcagtcaaatttattaaagatcgcgaaaccggtcgtttcagaggtatcgcatttgtagaaatggaagatgcagcagctgcagctaaagctattgaagaactcgatggagccgaatattttggccgtaacatggtagtgaaagaagcaagacctccgaaatactaattatacaggagaaaagaaaacaagtccgcctgctccctttcagaaagagagcaggcggactttgtttttagtgattaggagtaaatgattaatgttgcgctaatcacttacccctaatcactatttcataaagtctttgcgacgcagcacaaagctattacttaggtatttttcacgcacaattttattttctgctaattcttccggcgttccctggaacaagattttaccttcaaacaacaaataagcacggtcagtaatacttaatgtttcctgcacgttatggtcagtaatcagaataccaatatttttatctttcagcttccacacaatctgctgaatatcctctaccgcaatcgggtcaactcctgcaaaaggttcatcgagcatgataaacttaggatcaatagcaagacagcgagcaatctccgtacggcggcgctcaccacccgaaagttgattacccttattcttacgcactttctgcaaacgaaactccgcaatcagactttccagcttttctttctgatattccaaaggcttatctgtcatttcaagtaccgaagcaatgttatcttccacactcatctggcggaatacggatgcttcctgtgccagatatccgattccggtttgcgcacgcttgtacaccggatatttcgtaatatccagatcatccagaaagatacgtccctcattcggcgtaatcaatccaacggtcatatagaatgaagtcgttttaccggcaccgttcggtcccagcaaacctacaatctctccctgcttcacatttatggagacgtggctcactactgtacgtttaccgtactttttcaccaagtcttcggtgcgaagcaccattttactttcttccatattctttcagttacaaactgtcaaaaccacaagtgacgagcttgtcactcacacattttgcggcaaatgtagcaattatcagctgaaaatgggctatatttgcagacaaaatagttaagagtcatgataaaagcacttaaaactgtcggaagatacatcatgttgatggggcgtacttttgcccgaccagagcgtatgcgtatgttcttccgccaatacattaacgaaatggggcaactcggcgtgaactctatcggcattgtgttgctgatttcgttctttatcggcgctgttatcaccatacaaatcaagctgaatatcgaaagcccgtttatgccgcgctggacggtaggctatgtgacgcgtgaaatcatgctattggaattctcttcctccatcatgtgtctgatattagcgggaaaagtaggttccaatatcgcttcagagctgggaaccatgcgagtgacacaacagatcgacgcactggagatcatgggagtcaattcagccaattacctgatactacccaaaatttttgccatggtcaccactatccctttcctggtgacgttcagtatctttgccggtatcatcggagcctttgccacatgttggttcggtggcatcatgtcagcggtggacctggaatacggtttacaatacatgtttgtggaatggttcatttggtgtggtatcatcaaatcattgttcttcgcttttatcatcgccagtgtatcggccttcttcggttataccgttgaaggcggttccatagaagtaggcaaagcctctacggactctgtagtatgcagcagcgtgcttatcttatttgccgacttaatattaactaaactcttaatgggatgattgaactgaaaggactttggaaatcatttgagaacagggatgtattgaaggatatcaacgccacttttgagaacggaaaaacgaatcttatcatcggacaaagtggttcaggaaaaacggtactgatgaaatgtatcgtcggactactgacgccagaacgtggtgaattattatacgataaccgaaacttcctcgccatgggcaagaaggaaaagaaagcattgcgccgggaaatgggaatgattttccagagtgcagcattgttcgattccatgactgtattggataatgtgatgtttccattaaacatgttcagtaacgatacattccgcgaccgtacccgccgtgctatgttctgcctggaccgcgtgaacctggcagaagcaaaggacaaatttccgggagagatcagtggcggtatgcaaaagcgcgtcgccattgcccgtgccattgctctgaatcctcaatacctgttctgcgatgaaccaaactctggtctggacccaaagacatcgctcgtcattgacgaactggtacacgacatcacgcatgagtataatatgaccactctcatcaatactcatgatatgaactccgtcatgggaataggtgagaaaattatctatatctacgacggatataaagaatgggaaggcagtaaggacgatatcttcacctctagcaacaagaaattgaatgacttcatctttgcatccgatctcttccgtaaggtaaaggaattggaggtacaaaacatagaaggataagccgcttaatctcatccatctgtcataaataaaagcgtccggagatacctccggacgttttttttcttataaaaccagttaatagaattgacatatatcctcacgacatactttgattgtccctatatcctcatgagaaaacatgaagaacaatttcaattacgcaacaaagataaccaaaatatattaataaaaaatcacggaaaaccgttacttattgaattttctgtaaatcaatctagctttatccatccttgtgaaacagccttgaccaccatatctattgcatttttcgccccaaatttactaataagcctcttgcgaaatgtttctacagtattttctgaaatttttaataacgcagcaatctcatgtgtattcattcctttggctacagcttccagaacatcgcgttcgcgccgtgtcggagcatcttttggttgtaaacctgatgatgaagaatttaacttttgcaatatagaagcaaaacgaggacaagtatagctctcccccctcagtacactgcgaatagctgccaccagttctgcatgagccgaagatttcagaataaccgcatttactccgcattgcactaatcggttcaccatccatatctcctcatgcatcgtatttacgacaatcttcgcctggtcattcaactcacgaattttggctatcaattcaaaacctgaaatatcggggatactgatatccagaatatatacatcataatcacgctcttcaatcaactttatagcctgctttccggaagtcactgcatccgccactgttacttccggcatcttattcacaattttgcaaataccttctaaaatcaggctatggtcatccactaccaataattccgctttcacattcttttccattgctcgattagattattacatttactctcagccaggttccttcacccggagcagaaatcagttcaactttagcaccaatcgtttcagcccgttgccagatggtatgcaagccaatacctttggttttcttgctcatatcaaacccttttccgtcatctgtaacaagtatggaaaggttcttgttttccagtgctaacttcacctgtatacgggcagagctggcatatttcactgcattgctcaccgcttcctgaacaatacgataacattcaaatccaacagctttaggaattatattccagtcgacattttctgtagagtgatactccgcatacataccctccggtaatgccaaatgcagcacatagtctcccaacatctcgtcgagcgtagcatactggaaagcgggtggcatcaactcatgcgaaagagttctcaacctttcgcgagtattgctcaatagtcccaactgttcactcaaatccgaactttcctcaccggaaatagtacgaatattcatttcaagcgcaagcaaactgttacacacatcatcgtgtaattcagtcgccatacgttcacgctcactctccaaaccatcaatgtattttcgtgtcagacgctgctcagtctctttctgaagttccagaaactcacgttctttctcattagcggcattagccaacacagcgatccttgccctttggcgttgacgtgcatagagagaacctaataatagaattcccaacagtgaaattactgatcctacaatgatacggtgacgcagcatatacgtctcctgctccaactgttcctgcctcaaagtaacgatctccagttctttctctttcgtctgatattttactgaatactcagataactgttcggtctgttcagtatgaaaggctgaatcacgcagcgcataggcttgggtcagatactcataggcctgagatgagttgttcacagccagatagcaatctgccaaccgcttataatgttcataatcacgggtatctttgtagccactgcggagcatatcgatcattctccgataataaacaatggcttccgtataatttttactctcttgcaataaacccgccttcgcctgataatatcggaaccgttccgcatcagtttgcatttcatgtgccagcttatcaagcttttgcaaataatacattgcctgattcagatttccatccatccgataggcgttcaccaaataattataagcatcgcacaatagtcgtctgtcattcacttcttccagaataggtatggctttcaataatgtagcaattccctccgcacgcatttgcaccaatcggatctgaatagctcccaaattgacataacatgtacctatccttcgcttattacctgtcttcaaagcatattccacggctttctcagaaaaaggaatcgcatctaccggacgattccaatcacaataagccgttgctatatttccatatataaaagcaactgcattatgatttccacgtaactcgcataaatggagtgcctgttcaaagttggcaatgcaattctctaaattctttttccgacgatagatagtacctaactgattcaaattttcaattaacatggccgtatccttatcagcagcagaacgctcgctggcacggatagtataaactagagcagaatccgtcttcccttcaaaaagaaacgagctggcataattggtcaacatggtacggcacgcctctcctgcctccgataaatcctctccagcttccaaccctttacgaaaatagtaacgtgcagaatcataacgagcatccacattacaataataccccatatcacaacaagactggcttattgcaaatttcaaccccgctttttcagccagagcaatagctttccgctttaaggcatatccctgctgaaaatctcccttgatgaagtttccctcacttgcacaaatataatactctacgagttgttccggcttcttgcttttcgtagccaactgatgaatagaatctgcatataaaaggagtaattcaggattttcttccgtttggtagagatatttacaaactccgacatagccctccatatctctgctttgggcagccttttgttgaagcatacgtaagtccggctcatccgcagcccatagcatacctatggacaggaacaagcagcatcccaataaccacccgtagcgtttcatctaatcctttttttctgttacctaagcaaaaataaatattatattcatacgaacctattttttgtttgcatttcactgataaaacgtaaaaaaaccgcccgatttataactaaatcaagcggttttatttcaatatcttaaagccctaataatcctacttctgacggatatagatgtttatcggagttccggtcaaactccacttctcacgcatcttattttccaggaaacgtttatagggttcctttacatactgcggcaagttagcgaaatacacaaaagaaggcacctgcgtattaggtaactgcgtgatatacttaatcttaatatacttacctttggttgcaggaggcggatacgcctcaatcaagggaagcatttcttcattcagccgggcagtaggaatacgcgtcatacgattatcatacactatacgcgcttcttccagcaccttcagaatgcgttgtttggtcaatgccgaaccgaaaataatagggaaatcaacaaacggagcaaaacgactacggatagcatcttcgaaagtcttcattaccttcacagttttgtcctgtactaaatcccatttatttactaccactaccaaacctttggcatttttctgtatcagtgagaatatattcaagtcttgactctcaacaccacgggtagcatccaacataaggatacacacatcagcgttctcaatagaacggatagaacggattacggaataatactccaaatcttcattcaccttgttcttcttacggataccggcagtatctaccagatagaaatcaaaaccaaatttattgtaacgtgtatagatggaatcacgtgttgtaccggcaatctccgtcacaatattacgatcttcacctataaaagcattcacgatagaagacttacctgcattcggacgtcccaccactgcaaagcggggaatatcttcatccagtatttcgtcagcttctttcttgaatgtaccaacaatcaagtccatcatatcacccgttccactacccgtcatagccgagatacagtaaggatcacccaatcccagcttataaaattcgggagcattgtattgcagttctccgttatcggtcttattggcaatcagcaataccggcttttgagtacggcgcagaatagcagccacctgcatatcaaggtcagttactccattcattacatctaccacaaacaaaattacatctgcttcatccacagccatcaatacttgtttgcgtatctcttcttcgaaaatatcgtcagagttcaccacccatccgccggtatctaccacggagaactccttccccagccattccgatttaccatactggcggtcgcgtgttgttcctgcttcttcgttcacaatcgcctgacgtgttttagtcaagcggttaaataaagtagactttcccacattggggcgtcctacgattgcaactaaatttcccatagttcactctcattgttttttgcgactatcccagtcgtatgaatattctaatccagttgataaccaaaattgcgcaactctttgtcagaactacgccaatccttatccactttcacaaatgtctccaggaaaatagtctttccgaagaacctttccaaatcacggcgcgcctcagtagccacttttttcagtgccttaccctgcttaccgataataattcctttctgcgaatcacgctctacataaatcacagcattgatatgtatcttcttcgcatcctccttaaattgttccaccactacctctaccgaatagggtatctctttgtcataatataatagaattttctcgcgaataatctcattcacaaaaaaacgcgccggtttatccgtccattgatccttgtcgaaataaggtggtgaatccggcaataattccttcacccgcttcatcacatattccacattgaatttcgtagttgcagaaatcggaataatttccgcattaggcaacaatgctttccatgcttccaccagctccaccagtttctcctgattcgacaaatcgatcttgttgataagcagcaggacaggtatttccatacgtgccaccttttctataaactcattatgcttatcaggcgtctcaaccacatccgtcacatatagcaaaacatccgcgtccgtcaatgccgaggtagaaaaattcagcatagactcctgcaacttatactgtggcttcagcacacccggagtatccgagaatacaatctgcatatcgtccgtattatagatacccataatgcggtggcgagttgtctgcgccttaaaagtagcaatcgaaatccgctcacccactaaggcgttcatcagcgtagacttacctacattcggatttcccacgatgtttacaaaaccagctttatgcatcacattcctctattttagttgagacaaaaaaacgcatcgaaaataggatgcgttttttcttatttattaacgtaacgttgttactgtttttttccatcatatccccacttcacataaacggctccccaggtaaatcctgcaccgaatgccgtaaagatcaagttatcgccttttttaagtttatcctcaaaatcccacaggcaaagcggaagcgtaccggcacttgtattaccataacgttctatattaatcattaccttttcgcggggaacttccaagcggtgagctactgcatcaatgatgcgcaagttcgcctgatgaggaataatccagtcgatattatccttagtgagattatttctttccgcaatggcaacacaagcgtccgacatattggatacggcatacttaaataccgtacgaccttcctgataaagaaagtgcatgtgattatccactgtgaaataagaaggaggacatacagaaccgccggccttcatatgcaagaaaggtaagcctttaccgtctgttcttaaaatagcgtccatgacaccaacatcctcagtagtcggttccatcataaccgcagctgccccgtcaccaaagatcgggcaagtagcacgctcggtataatccaccatagacgacattttgtcaccacctactaaaataattttcttatatcttcccgaacggataaaattagctcccgtttccaacaagtacaagaaaccgctacaagcagcctgtaagtcaaaagcaaaagcatgttttaatccaagcttatcacataggatagaagctgtagaagggaaatgataatcaggagtagtagtagcgacaatcaccagatcaatgtcatcaggattagaaccagtacgctgcatcaactgctttgcggctttacgagccatgtacgaagtccccaatccttcttcgttcaagatatgtctttcctttactccgatacgggtcataatccattcatcattggtatccaccattcttgatatctcttcattcgtcaagatataatcgggtacatatccgccgactcctgtaattactgcatttattttttccattaatcctgcttaagttaatgaatacctaaacaacggtagtctaaaaaggtttgtgcttacaaatctttttagacatccggcattcaagtatattctttatcaggctgcaaattaaacagcagcttctttctcaatagcaagcttgcctctgtaatatccgcaagcaccacatacagtgtgatatacatgccattcgccacagttcgggcaaattgccaatgtaggagctactgccttatcatgagttcttctctttgcagttcttgttttagactgtcttctcttaggatgtgccatttttttttaatctttaattgttatctaatattttctttaattcgttccagcgcggatcaatctgagtttcctctacatcacctcccggcagtgcatcttcaccttcaataaagatttcatcttccgcatcatcttcgtccgctttcgtccgcaaatgcttatgcaacttactgctcactgccttgttacactttccgggagcatgtacatgcttcatcggaatagccaatgcaataaactcatacataaaccatgccacattgatctctccttcttcttcgggaatcacaatgaggttatcaccttcttcggcatactcatgaccgaacttcaccatcagcttatctgtagagcttaccggttgttccatatcatccaggcagcggtcacacggtacccataccattccatccgtctggaagttcaattcgaaagcacgagatgttttctttacaaccagcgtaacattaaccttacccttttgtacttctggtccatcaatgttagcaaagaaaaggttatccagtacaaactcatacttacaagagtctgcctgcatgcctttcaaatcaattttgtatttatcaaactttcccaaagcttcttttatttattcgggcgacaaagatacaaataattatcctcataatgtagaaattagcaacgaaatattcattttttaagctctattctgaatatcgtccccttattgatctccgattgcttcacaaaaatggatccagaatgatactcaaccacaattcttcgtgctaatgaaaggcccaatccccatccccttttcttagtggtatagccaggagcaaaaaccgtttcaaaatatcgtttgtcaattcctttccccgtatctgccacatcaagacaccaatatcttgacgtttcctgtaccgaaatatccaatactcctactccacccattgcatcaacagcattcttacaaagattttctatcacccattcaaacagagcaacattcagccgcacggggggaagtaaatcgggtacatgggtactgattttcactttatctgaagtacggtgggctatataatccgtcacccgttccaacagagcttttaaatctgcatcctccagctcaggaatagaaccgattttagagaaacgattagcaatcatctgcaaacgctctacatcctccgccatagcaggaatcaaatcatcctgtgggtattgtgtcttcagtaattccatccatgccattagtgaagagatcggagttcccagttgatgggcagtttccttggataacccaacccatactttattctgctctgcctttttagaactcaacaaagcaaagatagcaataagaacaaaaatgagtactaccgttaattgaacataaggataaacagctaaccgggtaagcataagggaaggtccataatatacattcagataatcgccaccgccattgagatctatgcgaatacaattaccttcacggttaaaatcactcagtttctcctttaaggagactattgtatcggctgaagacagttctatattcctatatgtctgtacatcctcattctgatcaaccacgattaccggaatagtatgattggcattcaaaactttcaagaccatagtcaaatccgtatttccatctgcagtttgcaaattcttcattgcttccgcccacacttccatacgtacccgttcttcagcagataaatcgcttatcagagaatgtgagacgtaaagagaggcaacagctatcaccatggcagctaataccaaccagaattttatcggatggatttcctttataaagcgcattatatataaataagatgtaaacttacggtatataaacggaaaaacaaaagaaatattatacctataaacacaaaaagcccccatatcatttcgatatggaggcttctctctaaaaaacggcaactacctactctcccacttgacgcagtaccatcggcgtgatcaggcttaacttctctgttcggaatgggaagaggtggaaccctgatgctatagtcacctaaataagttagacatgatgcaaaaaagcaaagattttaaactgaacgtatatacctgccatacaaggcaaagaccaaaagtgaacgggcaattagtaatgctcggctatgatgttaccacctgtacacctgcatcctatcaacgttgtagtcttcaacgaccctaagaaatctaatcttgtggctggcttcgtacttagatgctttcagcacttatccaatcccgacttagatacccagcaatgcacctggcggcacaactggtaaaccagaggtcagtccaacacggtcctctcgtactagtgtcagagccacgcaaatttcatacgcccacgatagatagagaccgaactgtctcacgacgttctgaacccagctcgcgtgccactttaatgggcgaacagcccaacccttgggaccttctccagccccaggatgtgacgagccgacatcgaggtgccaaacccctccgtcgatatgagctcttgggagggatcagcctgttatccccggagtaccttttatcctttgagcgatgtcctttccatacagaaacaccggatcactatgctctagtttcctacctgatcgacttgtaagtctcccagtcaagcgcccttatgccattacactctgccgccggttaccaatcggcgtgagggcacctttagaagcctccgttacatttttggaggcgaccaccccagtcaaactacccaccaaacagtgtcctcgcactggcgagttagaactcaaataaccaaagggccgtatttcaacagcggctccacaaatactggcgtacctgcttcaaagcctccggcctatcctacacatcaattacccaaattcaatgttaagctatagtaaaggttcacggggtcttttcgtcccatcgcgggtaatcggcatcttcaccgatactacaatttcactgagctcacggttgagacagtgtccagatcattacaccattcgtgcaggtcggaacttacccgacaaggaatttcgctaccttaggaccgttatagttacggccgccgtttactggggcttcaattcaatgcttctcttgcgatgacatctcctcttaaccttccagcaccgggcaggtgtcaggctatatacttcatctttcaatttggcatagccctgtgtttttgttaaacagttgcctggaccgattctctgcgccccacctcgcagtggggaccctttatcccgaagttacagggtcaatttgcctagttccttaaccgtgaatcactcaagcgccttagtatattcaacccgactacgtgtgtccgtttacggtacgggtaccttaaagattaagtttagcggattttcttgggagtatgcttacatgcactattggattgttccgaagaacgctccatactatcaggttcgactctcggagcggatttgcctgccccgatcaacatctacacccttcaacgaactattccgtcagttcgcggcactgtcacgcctccgtctccacgtcactctttaaggtagtacaggaatattaacctgttctgccatcggcctcaccgttcggctgagccttaggacccgactaaccctgatccgattagcgttgatcaggaaaccttagtctttcggcgagggggtttctcaccccctttatcgttacttatacctacatttgcttttctacacgctccagcaaagcttacgcttcaccttcaacgctgagtagaatgctcccctaccgatgtttgcacatcccatagcttcggtaaattgcttatgcccgattattatccacgccaaactcctcgactagtgagctgttacgcactctttaaatgaatggctgcttccaagccaacatcctagctgtcttagcaatctgacttcgttagatcaacttagcaattatttcgggaccttagctgatggtccggattgttctcctttaggacatggaccttagcacccatgccctcactcctgatatagaactaatacgcattcggagtttgtcaagacttgataggcggcgaagccctcgcatcttatcagtcgctctacctcatattagtataaatcaaggctgcacctaaatgcatttcggggagtacgagctatctccaagtttgattagcctttcacccccaccctcagctcatccggaagcttttcaacgcttatcggttcggtcctccagacagtgttacctgtccttcaacctggccaagggtagatcacttggtttcgcgtctactccttccgactatccgccctattaagactcgctttcgcttcggctgcagatctcaagatccttaaccttgccggaaaaagtaactcgtaggttcattatgcaaaaggcacgccgtcacagtttaaactgctccgaccgcttgtaggcgcatggtttcagggactatttcactcttctgttcgaagtgcttttcacctttccttcacagtactggttcgctatcggtctctcgggagtatttagccttaccggatggtcccggcagattcacgcaagattcctcgtgtcccgcgctactcaggataccactagggttcagttagcttagtataccgggttatcaccgtctatgactgaactttccagatcattctactcactaactttcgtcccacgacgtggtcctacaaccccatacatgccgtaacacatatggtttgggctattccccgttcgctcgccactacttggggaatcattatttattttctattcctacaggtactaagatgtttcagttccctgcgttcgcctccatcgtaagatggataatatctcttcaagatattgggttgtcccattcggaaatccgcggatcaaaggtcatttgcacctacccgcagcttatcgcagcttatcacgtccttcatcgcctccgagagccaaggcatccgccatgcgcccttacttacttttagtcttacctagccgtatggctcgatatatactttcagcttgttataactttactttttttgtacatcatgtcaaagaacggttgattaacaaattaataattaaatttgttatcagagtggagaataacggattcgaaccgttgaccccctgcgtgcaaagcaggtgctctagccagctgagctaatcccccttcattaattaaaaacttaaaatttaaaattaaatttacgacatcgcgttttaatttataatttataatttttaatttaagaagtagtcccaggcagagttgaactgccgacctctacattatcagtgtagcgctctaaccaactgagctataggactgtcgagttcaacctcgccttgcggctcggcttcttctttctcaatatatattatataaacaactacgcgtagtgcaagaggttcttatgtagcatgtcaaaagaaccaacttttaatttgttagtacagagagtttttaatttataattgttaattattaatttcaaaatctctcattttgactgagcgtcgctccagaaaggaggtgttccagccgcaccttccggtacggctaccttgttacgacttagccccaattaccagttttaccctaggccgctccttacggttacggacttcaggtacccccggctttcatggcttgacgggcggtgtgtacaaggcccgggaacgtattcaccgcgccgtggctgatgcgcgattactagcgaatccagcttcatggagtcgggttgcagactccaatccgaactgagagaggcttttgggattagcatcacatcgctgtgtagctgccttctgtaccccccattgtaacacgtgtgtagccccggacgtaagggccgtgctgatttgacgtcatccccaccttcctcacatcttacgacggcagtctctctagagtcctcagcatgacctgttagtaactaaagataagggttgcgctcgttatggcacttaagccgacacctcacggcacgagctgacgacaaccatgcagcaccttcacatctgccttacggctaatctgtttccaaattattcagatgcaatttaagcccgggtaaggttcctcgcgtatcatcgaattaaaccacatgttcctccgcttgtgcgggcccccgtcaattcctttgagtttcaccgttgccggcgtactccccaggtggaatacttaatgctttcgcttggccgcttgctgtatatcgcaaacagcgagtattcatcgtttactgtgtggactaccagggtatctaatcctgtttgatacccacactttcgagcatcagcgtcagttacagtccagtaagctgccttcgcaatcggagttcttcgtgatatctaagcatttcaccgctacaccacgaattccgcctacctctactgcactcaagacgaccagtatcaactgcaattttacggttgagccgcaaactttcacagctgacttaatagtccgcctacgctccctttaaacccaataaatccggataacgctcggatcctccgtattaccgcggctgctggcacggagttagccgatccttattcgtatggtacatacaaaaagccacacgtggctcactttattcccatataaaagaagtttacaacccatagggcagtcatccttcacgctacttggctggttcagactctcgtccattgaccaatattcctcactgctgcctcccgtaggagtttggaccgtgtctcagttccaatgtgggggaccttcctctcagaacccctatccatcgatgtcttggtgggccgttaccccgccaacaaactaatggaacgcatccccatcggttatcgaaattctttaataacaaaaagatgccttctcgttatactatccggtattaatctttctttcgaaaggctatcccggaataaccggtaggttggatacgtgttactcacccgtgcgccggtcgccatcaacctattgctaggtcatgctgcccctcgacttgcatgtgttaagcctgtagctagcgttcatcctgagccaggatcaaactcttcattgtaaaagtattgtgactgcgcaaattaataattaattattaaaaagcgacagtgtttttgctctgttcaggacgctcggtttattaaaagtcttcaaattacctatatataagttacttgacggttcttttttatacccagatgctgcgcttttattattaatttttaattattaatttgcgaagcacctgctcttgtactacttgtattgtttatgtaaattcttcaaagatcgcttctttttaaaactgcttttcttttcagaaagcggatgcaaaggtaagaacttttaagtatatcttccaaataatttcgaaagttttttttcttttttctttttctcgtcgtctctctttgcgaaagggagataaaagaagaagaagttcttagcgccgcctctatcagggaagctgactcagcgtcagcctcttctcggaaagcgggtgcaaaggtaagaacttttaagcatatcttccaaatgtttccggaagttttttttctttttttcttttagaacgctgtattcctgatcggaataaaggctaaagaaaagaaaaacgttggagttcctacgccgtttctgtcagaatgtcaatttcaaggctgaccgtctcttggttagcgggtgcaaaagtagccgatatatctattcgctccaaacatatctgtctttttttcgaaacttttttgaaacaatttcgtaaatggctgattgataaggatgttgtagaacataagtttgaaagggaggatgaaaggaactggaagggggtacattattatatatgcgtgcgcgcaatgtgcgcgtagacagaggcagggaaaagtactgggagaatcttaaagctgaggattggaagtgtaaagctaaggtttgagaacctaaagctgaggtttagcgaggtaaggttgagattcatttttgcggagttgaggtatggttttgtaatggtggggttggtacacttggtacagaggttcaccgttccctttgcctcacacacacgtgcgcgtataataaggtgtgaatccccaccactctgtccccaccactctgtccccaccactgatcattcctcaccgcttatccgactttgtataagttccatttacggctacgctttccaacagaccgtatttacacaagtgcttcagccaagtggaagcggaggtaatggcaaaatcccataggccttgaattccttcttctgctcgtcggtgaggcgaaacgtaaaagctccgcccatgacagcggattactgtcatttgccacattttcctcttgagcgtacaccttatatgttacgcgcgtgtgtgtgaagcaaagggaacggtgaacctctgtaccaagtgtaccaacgtcggatggaatttcggcttgatcttttcttttacgccgcacagttcgaccagatggatggcggtacttatatgcacctcgttgtgtccggttttcagcgcgttgctgaataacttttcggctacctgcggattatactttgatgaaaggctatgttatggaattcacaggaagtacagaagcagaaatcatttagactcatcccgatgtcccactactattcccattagtatgcagatacctctgcatgtcagatagaatacgtctactaaattactggttaactccatactatccagatgaacaagacaaaacggaaatcgaaaagaaatgaaaaaggatagccattacaaactttctttaccggatgagtggcaaaaagaagatttcactgcgtatatagccttagaaaatgaagaaaagagctgccacggaacaccttccgggcagctctcctttcatagaagtaaagtaacagaaagagagtatgatacagttttaattctgtccgcctcccaacgcttggaataggttaattaagctttgtatttcggtaaaatgattagcagtctgcgacaattgtgcgctaagcaatgtctgccgggctgtgagtacttccagataagtggtattgccatgctccatcagcaatgaagtacttctcagggcggtttgtaaagaagcaacctgtttatccaacagaagtttcttgccctgactggtctgataagccgttaaagcatcgttcacctcgctgcctgcattgagtaaagtttgctggaagccaagtgcggcttcttcctgctgtgcacgggcaatgcgatactgggcaactacctgtccgcggttgaaaagcggttgcgtcagcgatcctacagcagatgccagaaacttacccggattgagtatcatcactccggcagagttcgtccagccggcacttccacttaaagtaatggagggatagaaagccgaacgggccttattggtaccataaaacgctgcttcgagtgaacgctcggcactgcggacatcgggacgaccggaaagcatctgcaccggaatacctaccgaaaagtcggtggggaactgctgctgtgccagactaccacgttcataatgacggggtgtttcagccaacagaagggcaagactgttctctgcctggttgatttgcttcctcaagtcgagcacggagccctgtacctgatagtacgtcgcctccatctgcgatacggccgattcattcgccattccggcattcatcaaggcacgagtagacgccacggtttctttccacgcttcttccgtttgtcgggaaatggcaagttgttcgtcgagcatcagcagcgtataataggtattggctatcccggctatcagttgggtacggacagcctgacgataatcctcactttgagcataaagagcttgcgactgtttcttggcattgcgtatacggccgaagacgtccaactcccaactggcagtgacgggcaacgaataagtttgcgttgccttttgcgtatcgaagctgctcacggttccctgcggagcaagagcaaaggcaggcaggaaagcaagtttggcagacatcagtgttgcctgtgcttcctctacacgaagctgggcagactgataatcagtattggtctgcaatcccagttcaatgagggattgcagataaggatcggtgaagagttcccgccagtccatattacccagactggcggtgtcttcggtcactacttccccgccataaagctggtcggggatggaagtaacgggctcgtatttagtatagatgccacaaccgctcagcagcaggccggtgacagctaatgtgatgatttgctttttcattcttcagtatctttaatatgtttcctagaattgattttatcaataatgcaccatagaatagcagcaatacaatacgctatcaactgctctacccaaaatatgtcaccttgatacatcatcttttctttcatttatttattattccgttcagcttcactcttctccttctcaagcaacacttgtacgtctgcttcttcctccatcggcggacggattttctcctgtaagaattcaaagataatgtagaagacgggaactacgaagagcaatgccagtgtaccgacaaccataccgcccacaacgcctgtacccagcgaactgttaccattggcacctgcaccggaggagaacatcagcggaagcataccgaacaccattgttagtaccgtcatcaggataggacgcaagcggacctgcgcggcagaataagcagattccacaatacccattcctttacgacgacgctctatggcgtattccgtaatcaggatagccgtcttggccagcaaaccaatcaacataatcacacctgtttgcaggtaaatgttattctccagcccgagcaacttggcaaacaggaatgatcccatcaatccgaacggtacggagaaaataacggcaaacggtacaaaaaaactttcgtaaagacatgccagaatcagatagataaggaatatgcaaatggcatagatgaaaatagtctgtgcaccaccactacttgcttcttcacgtgccataccaccatattcatatccgtagcccgtaggcaaagtctgttctgccacctcttcaatcactttctgcacttcaccggaagagtaaccttcggcaggatttacattggcagagatagagctatacagattgaaacgattggttgtttccggtcccaacactttcttcaatgttacaaactgacttaccggagccatttccgtaccattccgtacaaacatattgtccagagattgctcgtccaggcggtattcaggcgaagcctgcatcatcacacgatacactttaccgaactggttatagttagatatgtacgcaccaccacaatagctacccaatgcatcgagcactgctcccggagaaataccggcacgcttacatttagccgcatccacttctaccgatacctgcgggaaattgatggcatatgccgtgtaagccatagctacttccggacgctgattcagtgcgccgaggaactgcattaccgactggtagaatgtttccatatcgccacccgtcttgtcctgaaggttcagttcgagggagttacccataccataccccggaatcatagcaggctggaaactgaatatctgcgcttccttaataccataaaactgtccattgaggcgggcaaccacagcatccgaactatgatcctttccttttcgttcgctccagtccttcaagcgcacaatgattgtaccgtaagaagttccctgaccggatataagtccatagcctgctacgcgggcataatgttctatttcaggcgtatcccggaggatatcttccagtttatccattaccttcgttgtttcatcaagcgtgcttcccggtgaaatactgacgttcaccatgatgacaccctggtcttcctgaggaacaagtcccgttttggtagtgctcatcagataaaccaacaacgcgatagcggctatcaacgaagcccacaccatccagcgatgacggatgaagaacatcacacctttcttatatttacccagcacagcgttgaacgaggcattgtaagctgcgcgtacccgtccgttaatactcttggcactcttggttccgtccgacggacgcatcatgatagcacacaaagccgggcatagcgtcaaagccgaaatcatggaaatacctacggcagttgccatcgtgataccgaactgtgtatagaatacaccggaagttcctcccataaatgttacaggaataaacactgccatgaatacacaggtacaagagatgatagccatcgtcacatcacccatcgcatctttagtggcaagataaggagatttgtatccggcatcaaatttggactgcaccgcttccaccaccacaatggcatcgtccaccaccgtaccaatggcaagcaccagtgcaaacaatgtcaggatattcagactgaatcccgcagccaccaggcaggcaaacgtacctaccagcgacactatgatggatatggacggaatgagtgtactctttaagtcctgcaagaagaaatacaccaccagaataaccagaataatagcgatgattaatgtttctaccacattgtggatagaagcgaaaaggaagtcgttggaactcatcatcgtgacaaactctgttccctccggcagactcttttccatctgcttcatctgggcagtaatttccttattcacagcggttgcattggagcctgccgtctggaataccatgtaaagaacagccggtttactatccatctcactgcggaagctataagtcatcgtacccaattgtacatcggctacatcctttaggcggagcacagaaccgtcgctctgcgaacggattacggtattctggaattcctccacactcttcaatcgtccgcgatacttcatggtaaactggaagacattcttcgaactctcacccagcgaaccggtaggagcttcaatgttctgctcacccagcacggcagtaatatccgaaggaaccagggcatattgcgccatccgttccggtttcagccagatacgcatactgtatgtatctcccaattccattacatctcctactccctctacgcgtttgatttgaggcagtacattgatgtccagataattggcaaggaacgtctgatcataacgcccgtcattgcagaccaaagcaccaatttggaggaagctggtctgacgcttctgcgtgcttacgccgattttggttacctcggccggcaacaaaccctgtgccttagctacacgattctgcacattcactgccgccatatcaggatccgtaccttgcttaaagtagacctgtataatagcgaggccggagttggatgccgtggaagtgatatacatcatattctccacaccattgatactctcttccaacggcatgatgacgctgttcattactgcctcggcatcagcgcccgtatactgagcacttacatatactgtgggaggtgcaatgtccggatactgctctaccggcagcgtaaggagcgaaataagccctatgaccagaatcagcacggagatggagatagccatcaccggccgctttataaatacatttcctttcataatttgtctcccttcttattttacttgtgtgccctcacgcactaatccggcaccttccgatataatttcatcaccggattgtaatccgctgagcaccacatattcgcgcccatcgttaattccggctacagtgatcagtgtagagactgctttgccgtccactactttatataccacaactttgtcctgcatctgcacagtggctccctgcggaatggcaatacaatccttatagatgctgggcaccactaccgtaccggatgctccgctatgaagcaggcgtgattcgttaggaaataccacacgtgccattacagtacccgtctgacggtcgataactccactaatggattctatgacacctttcttattatataccgaattatcattcagtatcagttccacttccggcatgttcttcagagcttcatccatgctaccatactggcgtgtaagggcaagtaactgattttcagtcatggaaaaatagacatacatgtccgaattgtcactgaccgtagtcaacggatacggcaggttggcacctaccaatgcacccacgcgatagggtaatgcccccactactccgtcgctgggacttttcacctcagtataggaaagattgttgcgtgcgttcacttcctgggcttcggcctgcgtcagctgtgctttggcagtgagataggtgttctcagctgttttcagactgaactctgaaactactttctgtgcatacaactctttattgctgttgtaggtgagttcggcagtcgccattgcagcacgtgcagcttccacattggcaacggcagtcttgagcgcagctctgtagggaatctgatcgataacgaaaagcaactgtccacggcgaaccgtctgtccttcagtcacacaaagtttttcgatagtacccgatacttgcggatagatatcaatatcctgccgcccacggatagtggccgaatacgaagtggaaagttctttatccgccgcttttacttccattattgcaaaagaaggtttcactcccgcatccgttgcctgtttgcaagatgccatccacactgtacaaccgacaatccctatcagccgtaaccattttttgttcactgtaatcatacttactctaattgtctttttattaaaactgggacaaatgtaggagaaaggaacaaagccatagtgatcaattttcccccaagaatgtcccattttcgttattcgtcacttttaaagctaactaattatcaataagcatcatatagaacaatattaaaggataataggacatcctgttttccccataatttaccaactttgcaaaaagaaaaatgaaataatatggaaaaagagaacattaagaccgtaaccatagaagactttaagaacagtcagcatattcttgactatatagatgatgactttgcgatagtcaacagtctggatggaataccttatagtaatgaggttgtcagattggagtgtttccttattgccgtttgtatagaagggtgcatacaactggatatcaacaatcggacctaccagctacagccgggcgacttactgctcggccttcccaacaccattatcggacacacaatgatgagtcctaaatataaagtaaggcttgcaggattttccacccgattcctgcaacgtatcctcaaagtagaaaaagatacgtgggacactgccatccatatccacaacaatccggtgaaatctattaacagggaaaatgacaacagcatttttaaacactatggagacttaatcctggcgaaaattaacgatgaaccccattgttatcataaagcggtggtgcagcatctgtttgccgctatcttttgcgagatgatgggttacctcaacaaagaaatcgccgattcggagaaagccaaactatcgaaagagggcatcaagcaggctgaccatattctacggaagttcatggaactgttgtcgaaagacaatggtatgcatcgttcagtgacttactttgccgatgcactttgctatacgcccaaacacttttcaaaggtcatcaaacaagcatgcggaagggctcctctagatttgataaatgagactgcgatagagcacatcaaataccggctgaagcattcggacaagtctatcaaagagattgcggaagaattcaacttcccaaatcaatctttcttcgggaaatatgtaaaaggacacctggggacatcacccattcgctatcggagcacaaaagaggaataattttcatttctgtagggttatgaattaattcaccacagattacacagattgacacagattctattttactgattattagattaataaatctgtgtgaatctgtgtaatctgtggtgagtcttattcattcctataccgttatgaagtaaaactgcttttattgaatccatttgcccactttatttgttacttatctgaacgattagtaacaatctcccgattatgaaatataaatccttgtccttattaattatagtattgttttctgcctgtacgctcggagcacagaaccgtaagaaagtgggaatagtattgagtggcggcggcgccaaaggagtagcgcacattggagcactgaaagtgatagaggaagccggtattccgatagactacgtagtgggcaccagtatgggcgccatcgtgggtggcctatactccattggttacaccccgcaacaactggacagcattgtcaatgcacaggactggaaatatctgctttccgatgcccttgatccggaaactacactgttgagcgagaagctaagagaagaacaatacctgctgtctgtaccaattgcagggaaatcggcacatgtatccgatgccggaattataaaaggaagaaatatctcccggctactctccgaactgacagtgggatatcacgactccatttctttcaaccggatgcctattccattcgcctgtgtatcggataacatcgtgaatggcagcaaagtcgttttccacaacggtattctggcaactgccatgcgcgccagtatgtccattccgggagtattcgcccctgtttatctcaatggcatggtattggtggacggcggactgacggataattatcccgtagacattgcccggcaaatgggagcggaaattattatcggagtcgatgtacaaaatccgttgatgaaagcggatgagctgacaagcatgtcgaatgtactcgggcaaattctgaatctggtgggagaagagagttacaggaaaaatgtgaaggacagcaacatccatattcaggtagatgtagacggttattcagcggcaagtttcaaccacgaggcactggatactctgatgcgcagaggtaaagaagccgccataaaagactgggacaagctgattgcactgaaaaaagaaataggtatccgtacggattaccgggcggaatatcccggaccgttcaaaataccaacacgggctatgctggatacgataccttccgtagcacaaatcactccccatgaaaaaccggtcaatactataaatattggaggacggtttgataatgaagaactggcagtattgttattgaatgcgaggggttatttcggagtacagaagaaatcgcagttaagcctcactacccggttaggaaagcggacctttggaaggcttgaatatacttactcaccacaaaaaagctgggatataaatacaggatatcagataggatacaatgattttaatctttacgaagaaggtaagcgactgatgaatctgacctacgtacatcacatggcttgggtcggattcacgaagagctggtataaaatgcttgtcaaggcgggaatccacttcgagaaattcaattaccatgactggccctcgggaccggacgtttccattacaagatccagtgacaaggctttgctcagttatcaggcgagtatcatgtacaatagtctgaataatcagcgattctctactcaaggaatggaatgggaagcagcgtacaggctctatacagataacatggtaacgtatggttcgaacagtcccgtgtccgtattccaaactcattggagcggatatttctcaccgaatcgggtattcaccatcatgccatcggtgtatggaagggtagttgggaagaatacgcagtcattggccatatctaacttcgtgggcggtaatgtgccgggacggtatatggaacaacagatccctttcacaggtatcaatcacatcgaaatgagtccggatgccatcttgacaggaatgttgggagtcagggcaagaacttacaagaatcagtatatcgtagttcggggcagttatggacggacagccaacaagatagaaaatctgtttggcggaacaaatacacacggattggcgggcggcagtatagggtactgctacaatagtatcatagggcctatcgaggcggaactcaactattccaatcagtcaaagaagctaggatactatatcggggtgggatttacgttttagcgttattctttcgcctcttcctgtggaatacggatagccgtgtacaactccagtatggcagcaaccgtcaggcatacaatccattcgtttccatgagtaaagaacatgaatgcacccgtaagtaccagcagcaacgcaccaaatatttgttggcgacgaaggcgcttcacattggctctattgctcttggaaggtgaattgatctgtgccaacgctaccatagtggcaccaatcgtataaacatagggagcaggctcccaaccggtaatatagacggcagcaccaaacagtaccatcaaagcgcctacagtaaacaaagcaggtatcagggatttcatttttcgatgtcttcttcaaatacgtaaatatcctcattcggtttcttcatcaggtacttctcacgcgctatgcgttcgatggcaccggagtccacagctagttcgttcaaccgctctgtgttctcttcatattctgcccggtatttctctatctcattattcaaacggctgatttcattcgcatagcccatgcggcgcacaatgctgttctcgtccagaaaaccgacaataaccacaaacaccacaagcgtaatcaggtatttacgcctgcaaacaaaggcccaaagtgtcgctaatttatccattgataaacaaattaaagaatgaaaaaattaataattaaagaagcccgggagagattcttcgcctacaaagataagaggaataactgagaaattccttttttttgtgtacatttgcacaaattgtaacggacaagaatatcccaaatcatggaaaactatatcgtatcggcacgaaaataccgccctaccacctttgagtcggtagtgggacaacgtgccctgaccactacgctgaagaatgccattgccaccggcaaactggcacatgcttacctgttctgcggtccgcgcggcgtgggaaaaaccacttgcgcccgtattttcgccaaaaccatcaactgtatgactcccacggctgatggagaagcgtgtaaccaatgcgaatcatgtacggcattcaacgaacagcgttcatacaatattcatgaactggatgccgcgtccaacaactccgtagacgatatccgccagctggtagagcaggtacgcattccgccccagataggtaaatataaggtatatatcatcgatgaggtacacatgttgtctgcctcggctttcaatgctttcctgaaaacgctggaagaaccgcctcgccacgccatcttcattctggctactacggagaagcataagattttgccaaccatcctttcccgctgccaaatctatgattttaaccgtatcggtgtggaagacaccgttgcccatctggcatacgtagcttcaaaggaaggaattaccgccgaaccggaagcactgaatgtgattgccctgaaagctgacggtggtatgcgtgatgccttgtctatcttcgaccaagtggtcagctttaccggcggccacatcagctataagagcgtaatcgagaacttgaatgtactggactacgaatattatttccgactgacagatcattttctggcaaaccaggtcagcgatgctttgctgctcctgaatgatgtgctgaataaaggattcgatgccagtcactttgtaacaggactgtcttctcacttccgcgacctgttagtaagcaaagaccccgccacattggcattactcgaagtaggtgccagtattcgcgaacgttaccagtctcaggcacagaagtgtccgttgcccttcctttaccgggctatgaagctctgcaacgattgtgatctgaattaccgtgccagcaaaaataagcgcttgctggtggaactgactctgattcaggtagcccagcttaccgccgagggggacgatgcaggcgatgggcgtggccctaaacaatctatcaaacccatattctcgcagcctgccgccgctcagcagccaaaggccgcaaatgctatgccccaacagcaggctacaaccgctgctccggcacagccccgacctgtacaacaagcccccgcagcccaggctgcctctctctcgccggaagttcagcaagcttttagctcgcagacgaccatgcgtcccactcctactgccgtattgatggcacaaggaaaagaggaaaagaaaataccagtcatgaaaatgtccggtctgggtgtttccatcaagcatccgcgagtagacgaagagcaacagaaacgtactgtttccaccgttcagcagaatgcacaacctgaggaagatttcatcttcaacgaaaaggacgtgaattactattggcaggaatatgccggccgcttaccacaggagcagactgctcttgccaaacgtatgcaagtaatccgcctgaccatgctggatgcgaccactttcgaagttgttgtagaaaatgacattgcagccaaggagtttaccgatctgattcctaccttgcaaggttacttacgtaaacgcctaaaaaacagtaaagccaccatgaccgtccgtgtcagtgcccccaccgaaaaggtacgtgcttacagtcgtgtagagaaatttcaactaatggcccaaaagaacaatgcactgctacaactgaaagatgagttcggtttggaactatattgataattataagtaaaagattgcattatttattcagcaaataattttgtttttttagttttatcactacatttgcgaataatctaaataaaatatcttctactttgagaaagattgctattatatcggcagtggctactattttgctcttttcctttgcgacgagaacatacgctactcgtacagacaatgaacacttgtctgcattgcaatcacttatcagcagagaaattccttacgatgccaacacaccgatagacagcattatctcctggacaaatcaactggcacctactctgaaatttccccggacagaagaatcctatttcaccttactgttatggcaagttagtgcatatatcatgcgaggcgacctcagtctggcagtagaccgggcacggtatatgtacgaaagtgccaaagacatgaactccaacttcggtattgcccttgccaatcaagccatcggtcaggcatatactgcctcttacatacaggacaaggcgttaagttcctatctggatgccttgcaccacttatccccgaataatccgcaaacttatcgactcctggtgaaaatctccactcttttgcaacagatgaaccgattggaagaggccatgacgtatgtaaatcccctgaaccaacttctggaacagcagcccgaacatccgctcgccattcccatactcatagaaaatgctacttactatatttcctcgggagatcagcaaactgcgctccagtatctgcaaaaggcagattccatataccaaaaccatactcacgaaccggctcatgggttctccatcgactattatacagcagcctgctaccgtgcattggcagcagatgatcatgacaagcaaaaagccgacgaagcacttgccctttacaataaactgctcgaactggtttccggcaacaaacgttccctggagtatcgctcgatttctgccgaaaagatatatttgtataaattactggggcgctttgatgaggcttgccggatatatcaggagttatataccgttactgacaccctcgcttcgaaaagttacatccgccagataaatgcattgaaagcaacctatcagatagatgaactgaaactggggaataaagcacaggaaaacagaattgtacttgcttccatcttcatcggacttggattattggctttcatctccatgttagccgtatggcaaagaaaacagaaaaagaaagtggcactatccaagaaaaatctggaacagtcccggtggaacgcagagagtgcaacgcgcgcaaaaagtgtattcttgtcgaatatgagccatgagatacgtactcctctcaatgctttatccggtttttcttcactgctgaccgaagaagggttggatgacgccacccgactacaatgtactgagattattcaacagaactctgaacttctattgaagctgataaatgatgtgattgacctgtcgagcctggaattcggtaagatgcagttctctattggagaacatgatgcagtagctacctgtagaaatgttactgacacagtgggcaaagtaaaacaaacacaggcggaactgctgtttgtaacctcactggaagaattgaaaatagaaacagatgattctcggttacagcaagtattgataaacctgctgataaatgcaactaagttcacagcagaaggtgccatcacactgaaactggaaaaagaatcggatgacatggctctattctccgttacagacaccggttgtggtatcccgaaagaaaaacaagctcatatatttcaacgtttcgaaaagttggatgagaacgcacaaggaagcggactcggattgtctatctgccagctaattatagagcatataggaggcaggatatggattgatccggactatgacgaaggttcccgtttcttatttacacaccccatacgccagacaaaaggcacacaaaaaaaggagggtcgcgcatgataaagcgtctgattatagcactggcattaggcactggaattttattcaccgccaatgcccaaaatagcaccgttaaagacagcctattgcgcatttacgtcactgcgccgcacgactctatgcgcctggatgtactgcatgacatcgcccgcctggaccagcagacaccggtattcctctattatgagaataaattgctgaaagaggctacggagcaaaacaacctccgttatcagagtcttgccacctatgagcatatcatctactttttcaataaactggatctgaaacgcgtaacgcagtggatgaacagaatggaagttctggcagagaagcataattattacaatgattacttcaaagccaagaagttacagattgaaatgtatacaatcaaccaacagatagaacttgccatccatgaagcgaacatcatgtatgataaagctaaaaaactgaatgacagcaatggtatgcgggaagcctgtctatgcctcatgaccagctacattgccacactacgttacgaagatggagccaaggccttggaagaagcattccatctaatgagtccgcaagacagacctatggataaaataaatctgttgtcgaaggctgtgctggcttattcattcctgcataataatgaaaaaatgtatgcttcgctggaacagatgaaagtagcgatacaagacttaataaccgccacaccggcactcaagaatgcatactcagccctatatatgggaatggaaactcaatacgccctttactacgtccgcacgggcacccccaagaaggcctgggaacacctgcaaaaagcagatgaatatgatacccctaataccttcctgccgtacagagtatcccgtctgcaagcttatgcagaatattatcgtgcccgaaaagaatacgaaaaagccttggagtcattggataatgccattaccctgacacttcagatgtctttcccggatgccatactatatatggctatgaaagcggatattctagtggatatggggcatccggaggttgctatcaacatctacaagaaagtaatgcatgataaggactctctataccgagggttgtccaacgcgcaaatggagcaaatacagagcttgtacaatatggataagctggtgctgaaacgagaacagcaacaagaaaagatacattattttgtattgatcgttattgggattgccctgctggcactgatcgctttcgttatccacatgtacttcagcagaaaaagattgcagaaagacgagaaagaagtggcccgtctgagtgaaatagctgaggaagcgaatgaagtaaagagccgcttccttgcaaacatgagttacaatatccgtattccactgaataatgtggtaggtttttcacagttgctctctacagatatgggattggatgataaagaaaaactggagtattctgaaattattcaggcaaattctactgatttgattcaactggtgaacgacgtactcgacctctcacgcctggaagctaaaatgatgaaattccagatacaggattgcgaaatgcgggaaatatgcaatgaccttatatatatggcccggagagacagtaacggacatatacatgccgaactggaaagtgatgtggaacaccagatgcttagaatggacgccaaccgcttcaaccaagctgtattgagtatgctgatttatcctgtacccaatgataccgatcgtgaagtgaagatgcaactgagcaaagacgaagaaaatcagttactgatattccgtatcataaacagcccgttagttgatcctgcatttgcctctcagcaagtttccatacggctaaaaatcaatcaattgttatttgaacattttggtggtagctttatggtaagtgaaagtgccgaggatggctatcccatcacttttagtattgctactctgtggtgaatcttattcaaaataaaaagtgagtacaatcattcgggaagtaattttgtcgactgactgcgtgaacttcaataatgattggtccgtaagatctttacggtctttcttaataagatttgccagtccgaaacagaacttcagttccgggattaacttgaaataaggcagataaaaatcacaccccaaccctacttctacataacaatcgaaaggctttaccaataaggccccctgcttcttcacactgaaatcatacgtaggagcaatacctgccaccagataaggacggtaattattaaaacgttcagcagaaaacttcaaatctaccggtacagaaagataggcggatttcatcgactgcgaatgttcttcaccactggcttgctcgcggaatactactttcttatccccgaaatgtaatgtcgggacgagacgcaaggaaagaaactgattcaaataaagttcgcccaatactccgaccgtaaatccgggagaatattcaggcacatcggcaaaccagctctgaccatcttccgtcacatatccggtattcaccaatttatagtcctgcacatggatacctgccaaaaaaccatagtgccacctccgttgatcgatatacggacggttctgcaccttccgcttctgtgccgaggcaccaaaagcaaggagtaaagtaaggattatcagacaaatgcgcttcacatccttaaaacgcagaaagtgacattttattgcattttccttcggttttctccccactattatttagacaaggtacaaattaagggaatttaaacaggtttgataacaactaatcaagaaaaccactatttttgccgaactaattagtactaataatttaaaatctaaagaaaatggcttacgtaattaatgacagttgtgttgcttgtggtacttgtattgacgaatgtccggtaggagctatctcagaaggtgatatctacgctatcgaccctgaaacttgcacagattgtggtacttgtgctgatgtttgtccgtctgaagcaattcacccggcagaataataacaacactcaaaaaaagaaaagcccggtttcaattatgaaaccgggctttctcatttttatatactatcatttatttcagttcagccaatgcttccttaatacgacggatagcctccacaatattctcatcgctggtcgcataactcatacggatacattcaggtgcaccgaatgaagcaccacccacacaagctacatgagctacttccaacaagtacattgccaaatcatccgaatcttcaatcttacggtcaccggcagattttccaaagaaagaatcacatttcgggaacaggtagaaagcaccctgcggcacgtttacttcaaatcccggaacttcttttgccaacttcacaattaaatcgcgacgacgttcgaaagccttacgcatttcttcaacaggagcctgtgttccagtgtaagcagcttcggcagccttttgagatacagaacaagggcctgaagtatattgaccttgcagcttattacaagcttttacaagccattccggtccggcaatgaagccaatacgccacccagtcatggcatatgctttagatacaccatttacgattaccgtacgatctttcatttcggggaactgagcaatgctctggtgcttgccaatataattgatatgctcgtaaatttcgtcagcaataacaataacttgcgggtgttttgccaacacgtcagccaaccccttcaattcctcctgagagtaaactgaaccggtcggattagaaggtgagcaaagaatcaatgctttagtcttcgaagtgatagctgcttccaactgtgcaggagtaatcttgaaatcctgttcgatacctgcggtaacaatcaccggagtaccctcagccaacttcaccatttccggataacttacccagtaaggagcaggcacaatcacttcatcacctgggttcaccaacaccaatactgcattacaaaccgattgtttagcaccattggcacatgaaatttgtgcggctgtatattccagaccgttttcctttttcagtttctccacgattgcattacgcaaagccggatatcccggaacaggagaatagcgagagaagttgtcgtctatcgcttttttcgcagcctctttgatgtggtcaggagtattaaagtcaggctctcccacactcaggttaattacgtcaacgccttgtgccttcaactcggcgctcttttgcgacatagccagcgtcgccgagggcgacaaactgttcaaacgatctgataattgattcatttttctatctattttatggttgttgcataaatttggctgcaaattaagctattttctttgatattagaaaacaaaacagcaaattacttattaaaatgtaatgtatgccccatgcgttccttctttgtacgcaggtaacgttcattgtactgattcggggttgtttcaataggaacaatctctgtaatctccaatccataagcctccagccccacacgcttcactggattatttgtcatcaatctcattttgtgtacacccaattcacgcagaatctgagcacctacaccataatcacgctcatcagccaggtgtcccagacagatgttggcatccaccgtatccagtccgtcttcctgcaacttatacgctttcatcttctccatcaaaccaataccacgcccttcctggttcagataaacaactactcctttaccggctttattaatcatttccatagccttatgcagttgttcgccgcagtcgcaacgcttggagccaaatatatctcctgtggcacaagaggaatgcacacgcaccagaatcggttcatcttgttcccaggtacctctgaacagagccacgtgctccagaccgttagatttctgacggaaagggatcaatcggaaatgtccgtgttcggtaggcatatctacttctaccccttcttccacaatggattcttgtttcagacgataggcaatcatgtcacgaatagaaattaacttcaggttaaattcgtcagccatcttacgcaattcaggcagacgagccattgatccatcttcattcatgatttccataagtgcacccgcaggataaagacctgccatacgggccatatcaatcgtagcttctgtatgcccggcacgacgtaatacacctttttcctgagcatacaaggggttgatgtgtcccggacgtccgaaggttgccggagtagaagccggatcagcaagcgcctgaatggtagcggcacggtcggcagcagaaacgccggtagtacaaccttccagtttatcgatagtcaccgtaaaaggggtgcccaatacggaagtattgtcactgacctgatgaggcaaatctaattctttacagcgtgacacagtaaccggcgcacaaagcacaccacgtgcatgcttcagcataaagtttaccttctcaggagttattttctccgcagcgataatcaagtcgccctcgttttcacggtcttcatcatccaccacaatcacaaagttaccggccttgaagtcttcaatcgcctcttctattgtatttaatttcactttttccattctgtattctcctttatttatttaggttatttcagattagtttctattatcttttgaatgtcttcattagtcttgataatccgctccatatccttattcaaccggatacggaatgcccagatgcgaaagtagaagaacaatcctatcggcaccaacaatccacaggccatattcagccaataattacggaaaggacgcaagtgagcgtgaaccgggataataggatagttattcaatgcattcagcaaatgaacagatttagtattggacatctcttctactaatttctcaagacgctcatttatatcttctatttcttcatcgattgagtctgccatccacaacttgaaatagttgggagcacgcttcaacgctttcctttcagcatacgcacgacaatcagcagacagtgcctgcaaatcggcaggcaaatgagtataatcaggatcgtgtataatcacctctttacggaatagatggcgcacactgcgtataccgacgatcttcttaaaccaactcacataggcatcggcattcaataccacggagtcattattggacttataagtaaggaatgcacccaatggagccaagatagctgtactggtccacatacccatccagacaacccactgtccatcacgtgccattttatagcccgtattattaataatgtagtaaataataaaaataagaacggataccacaaccggcatacctaaaccgcctttacggataattccacccaacggagcaccgataaaaaagaaaataaggcatgccaccgaaagtgttaatttctcatgccaggacgtcatgtgacgacgaaggctggtatctgtctgtgacatactataactcttgacactccaatcgctccctgcactctctgcacggttcacggcagtagaaatgatcttctgcttctgtgacaaggtagccacattgaaaagactgtccacattgtattctcccaaatgtgcctgctctatcttcagcgtatcagctttcttcaagtcagcagaaatcttgtaagtgccattcatcgcttccttgaaatagacacgtcctacactgtcattctgcaccctcatggagtcaatgcccgcttgcagcatcgccatatccttgctgttagactgattgctcatgatgccggcatccaccatattaaaatcggaattgaactcaataatagcatgcttctcccgaaatgcttcccgacgataaggcacattcttctgattcatattctgtgatttcagattttcaaactgctcaccactataaagatgcaaatacaaatgctgtttatcagccgtcatttccagtcttccggaatcagacttgataatctgcgcattctcaaaccctttttcaaaattataaatcagcacatcgtaaagcatacccgttttacggttcttatgttttacataaaggttatagccatcaatctcgtcatagaaaactccttccggtatatccaattccggagatttctgcttcatggaaattagcaatgtccagagcttagtctgtgccttcggtcctattacattttggaaataaaaagaaacgccacagatgaaaatgataaacacaatcaacgggcgcataatcttaagtagtgagatacctgccgccttcatggccagcagctcaaaacgttcaccaaaattaccaaaagtaataagtgccgccaacagaatagccaacggtaatgaagccggcaccaatgtaagggcggaataaaagaaaaattgtgcaaggacactcatttctaatccttttcccaccatttcatcaacgtacttccagaggaactgcatcatgaaaatgaaaaggcaaatgaaaaaagtgcccataaagagcatacagaagctcttcaatataaatatatctaacttttttatgcgcagcattttactcgtttcatgcaatgaagacacaaaattagcataaaaaagggagtgtggaaaatttttatatcaaagttaactaaaaaccgcacgttctccgcagagtatctacctgagagtcccataactcgcacaaatctttcacttcatccaccacagcgaaatctgtaacttctagcacgaagtcgtttgtcagttcattgtttgtcatctttaattcaaaatattcccgctcatattcatcatccagccaacggaagcgaataaaagagaaagcccgcacagcgataatctctgcgtcacgatgttccgtctttccccagaagaaggtgacaatcttatcgtccgactgtaccctgtctgcaaaccagccctccaaaccggtgggggtacttatcgcggaccaaagaatgcttttagaagttgcattcaagaggtattcccgatgaatcttttgtctttccatagttcatatttgctttttattgcggcggcaagatagagacttttttctaattacggaatatatttctccaattttattcatccagcttttccttttaccacataactccctgatactgttcttaaaagaggcatatagaaaggttatttttctttgtatcgtttctattcaataaattattttgcagaaaattttcacaaatgttttggcgatttaaagaaaagctatatctttgcacccgcaaacaagaaatgatggcgggatagctcagctggttagagcgcatgattcataatcatgaggtccccggttcaatcccgggtcccgctacaagattaagatttagactgttaggaggcttccactcttggcggtcttttttgttttttaccctcggtttgcgctatggtttacaaggatcaacgtaaaaacggatggatccatgtaaaagccagcctcaaatttaatgtagcaaggttcaacagattacccttccacacctctgcatccctctattcatcggccttatcgggtggaaaggtataatctacgtattttccacaacataacagataagcattttcctattacaatacatcatatactatgccaattatagaatacattatattgttttgcataaggcttgacattgctttacataaagtatgtcaattgtttgactatagtcagtaagttgtttgattataatccgcaagcttactgactatagtcagcagacttactgaaggtagtcaacagtaagcattcggccttgtacgtgtttctctccaagctataataaagtcaaaagccagacgtaatacgtctggcttttgactttatcagtctttcttgtttatcccttccaattaaatggcagtaaatcggagtagtcgtttttctcttctctttctttatcctgtactctaatcaacacgtcctgcatccatagtttcgggttcaccttattttccctgcaacatcccatcagtgaaaagaatattgccgctgcgtgtgcggcttcatgcgcccctgagaagagtacattctttctgttcagcgtcaggggccttatggatcgttccacgggattgttgtctatacagaaccgtgcgtcattcacgtatcccgatagctgttcaaatcgtgtgtacatatagaatatggccttggcaacaggcgatttatcgactgtatgttcatattcctccttgcaccatttttccagtcctttaataataggataggatgtttcccggcgaagctttactacagcctccccttccagatgttctaccctgattttctcctccacagcatacagtctgcctatttgttcaagtgcatgccttgctctgggagggtcattcccttccgcttccacaaacttgcgcctgacatgtgcccaacagcacaggtgcaactttccgggtagcgtgtcgaactcgtcatatactgcaaagccgtcgctctgtaccacccggacctgtcctgccagcagtgtgtctattccgctgctgccacgtcccttgtgatattcaaagaagggggtatggaaccggggcagatagaagttccacatatacccgcgatgaagggcaccggggcggtcgctttcaagtacgggatggggcgtctcatcggccatgacgtaataactgtccttaaccagttcacgaagctcattatagatcggctccagacgttgtgcggcagccatcatccagttacttacggtggaaggactcagatggatgccttcacgctcaaaaatgtccaactgcctgtgcagaggcaggtgatcgtaatatttggcggtagcaatgtgggacagtacactctccgacgcattgctgtgaggatgtgccattacgggcatgggagctgttatgatacgaccgtcggcaagccggtatttagggcggatgatacgtctcacatagaatcgggcagggctgacggcatattgttcgctcacttcatcccccagcttcgtcgctccctccagcgaaagaccttccggcatgggaatgatgatttcttcacggggaagggacgggtcgatgggcttacgggcgtggggagtaatctttttggtgaagctcttacggaaacggttgtaaccagtctccgattgggcagatttttcagccgttttccgctcctccgctaccgggtcattgacatcggacggagattcaaaacagatgctcaattggttggcgtcttcgggaagatgacgtttttcactggatttaccccataaacggcgtgtcaagtcagccaatttccatctcaggtcggcaatgacagcggtgcaggctgagatttcctcgacttggcgggaatactcctgcaaagaggcttcgtattttctcagaagttccgcatgttccttttcaagacattcacgttccttgcgcaactcttcgtactcttccaaggtaagggtaatgactggttctttcactgtatatccacttttttattatgcggcaaagttatcaaaataaagctgtacggattgtaggatgggagattacttttcaactgttttccgatactttttaacagtaagcagctcattcaggcgattccaggaaatttgaagaaaatctcttttccgttcgtcctttttcaagaggaaagaactgtggttcagacggcggcattccagacggtattcgtcctcgcaccgataaaggatatgcaatctgctacgggaacggtcaagaaaaatatggcaactctgccctgacacgcaagaacccgtatgccggatgacctcgccacaaagaccgtcaatacctttatggaaattacaaccatttggataaaggtaataagaccagaaaggactgctacggaaaagaccaagacctaaagggagaagtagatcctgaggagaatggatgccaagactggaagccgaaactttataacgacgaccaccatcaaatatgaaaagaacagaatcaaaatgattagactcggaaaagagactacgcagtttctcactttcactagaaaatactaagactgaacacataatggattaagatgattatgaagacacaaaggtaggaaggaaaagaagggaaagaaacacgcacaaggccgaatgcttacagtcaacatcaaataattcctatagcaaaacgaatgaatactatatccacatattaccttaccgcacccgtttctaccccttccatccgttaaggccgatgaacagagggatgcaggacagccgttcattcgaaaagttcatagctattgctggaaaattaaaggttacatactgaaaaagcacctccatttttgatgccataaagctttttacctatctttgcaatgatcgaaaaagaaaccaaactcgttcaacacgtcatatataaagcctttaaaggcaagacaagaatacaaacttttttctatatgcaatagagttatgcgcgagggattatttgttatcagccgtggcatcggccaagtgatgttccaaaacaatgcattttcaggtatattaatgctatcaggaattctgtacagttcctggcaattggctttattagctattattggcaatataataagtactgcaactgcctggatttgcagctacagccgtgaggatataaaaaatggactatacggattcaatggtactttagtaggtatcgccatcggagtatttatagagataacatggctatcaatgttgcttctgctaataacttccgccctatccacctggatcacttatctcttcagccttcagcatcgtttatccggatatacggctccctttattttgtctgtatggatattactggttggatgtcactggatatttccttcattattattatccaccacacctcttggggcagagccatcctctgatttcctccgcgctttctgtttgaatataggtcaagtaatgtttcaggggaatagtatatcaggattattgtttctgattgccattgcagttaattcccgcatcaatgctttctatactgctttaggttccatccttccaatagttgtggctgtgctaagcggtatggatcatgccatactaaatgccggattgatcggttataacggtgtattgtgcgccattgctttgggtgataaaacaatacgttccggagcatggtgtgtatgttccatccttatatccattttattacaatggctgggcatgcattggggaattacaaccctgactgccccttttgtcatttccgtatggataaccattatattaaagagaagcctggagaaaactgtatagtatatcttaaaaaaggaagaaggacaccaaagttaatggtatccttccttctatcaatcaatcatagtcatacaaaaactatttcaactttaaattacttcttacagccgcagcagcgggctcactcggtgcaacggatttccgggtgcaataatcaaattcggctgatttatcaccgctgaatgacttccatttcagtttcaacttaacagttttaccctccgtatcaggcaattcatccaacttaaaggcaaccaagccatcatccgtctttccatacgtatcaccatacgcattatgccggaactccacttcataaggattatccggattttgtcctaacaataagtttacaaaatgtttctgcgaacctccccatacagttctgaaacggagtgtcagatagccatcttctgcaagagtcacccagtcatttactatttccacaggatctgtaccatatattttatcattttcttctcccagatccggagcgataggctttgtcaagatactgtctatccagttgatgtgcactgctttcgtgtattcaccactggcttcgtccacttcactgtaattcatcaatgctctgacctctttatctccaaaaggagaggttttcacattggtcggtaataaggtcgtcttatcatccaactgcaagaaaaatgctccatcggcagcttccttcactgtcacaagggcattaggatacctcaggtaataagcgttattgtcgtcgtcgtccaggcaggactgaaaacctatagaagtggctactactgttgccacggcaagtgctttactaaatactgaattaattttcataatgtacttcctctaattaaatattcaaaataacttctttgtattagagaaataacaaattagaaaaaagactgcatagcatattgttaattaacaataatgtctattatttccaaatcatccggcacgtgtaccacaccggaaaattcctgagcagcttcttccgtataacacgctttacgcgtattcagcgtcttatcttccgtatgatataacaacagattcttcactttcagttcttccgccagcttcccggcatccagtgccgtactatggtgtttctcataaggtttgaatatatcacggtctttatacagacagaaagcctcgcacaacaaccagtcagccccttccacatagggacgattcttctcattataaggttcatctccaagacaaaccagcgattggccattcggcaatgtggtacgaaaaccatattgtttctctttagtcgatcctatatcaaaagattgtagttttaactcccctgctttaaatgtctctccgtccttaacctcacaaagttcaataccatttcccaaatactgtacaattttcttaggtaacgtcatccggcagatccaatccagaacttgtaatactttatcatgtccatacatccggaagactcctgcatatttcccactttgcatctgctgtgctaccatccggattacccataccgcacccaatatatgatccgtatgagcatgtgtcacaaacatatcatgaatacgttcaatggcgataccggctttctccaactgaaccaatattccatttcctccaccggcatccacaagcagcacattttcagctgtccggattgcgaaacaagtattatagcatctggtaacgcctgcattacctgtacctaacataataatctgagtatccttcatcctcttaattctataataaagaaatctgagccacaaagataaacagaatatgccattctataaggaaagatcaaaactctccttatagaatggcatatttataacagtatagtaaagtatataattacttactgaaatctcttggagccggaacaggcggcaacggtttacggttctgcaactccttcattacttcttcaatagccttattgagctgttcgtcttcaccgttccattccttcaccggatcgttatcaatcaagatatccggatcgacaccatgattttcaataatccactggcctgttttcgcatcataactggtgaagaaaggaacacggatatccgtaccgtccatataaggcaacggtccgctgatacctacaataccaccccaggtgcgggtaccgattagtttaccaagtcccagtgcacggaagccccacgggaagagatcaccatcagaagcagaatatttattaatcaaacaaaccttcggccccacttgtacagcatcgggtatagtgccgacacgcttcgtaccacgtcccatcgtcaagcggtaaggttcgcgagacaagcgttccaaaatcataggagatacattaccgccaccattagcacggtcgtctataatcagaccttccttgtcgagctgcggatagaaataacgggagaactcgttcaggccctccggacccatatcaggaatatagatataaccaatacgtccattggatgccttttccaccttcttcaggttatcctgtacccagttatactgataaagaggatactcattttccagcggactgatgacaatctttcttgcacctgccaattgcggtttgctgttcagcgagatttctgtcggtacatcagcctttcctaccagtaaagcatagatattcttcaccgtattcgtaggtataccgtcaatggcaacaatgtattccccggccttagcctcaatacccggttcagtaagcggagagcgcagttccttactccaggaagcaccgggaagtatcttatccaaacggaagaaaccactcttatctgccgatacctcagcacccagcaaaccagtcttgatacgtgccggtttatccgtttcacccggattgacgtatgcgtgcccgcagttaagctcaccaatcatctctccaatgatatagttcaggtcgagacgcgtctttgcataaggcagcagaacagaatatttctgcttgattgctttccaatccacaccatgcatattctccagataaaaaccatcacgataagcacgccaggcctcatcaaagatttgcgcccactccttgggataatctatcgtaatggacatattatccatattgacaggtgtactcagattagccgctccttccggtatagcggttacataaagcttgttgtccttgtagaacaaagccttttgactacccggagtaaccgtcatcatagcaccatcggccaccgtttcttctttctgaccttcaagatcgaaaaacttcgttccgccattgccccagtaatatactttctttccgtttgaatagaaattagtataataagaagccgacaatggaagcttgatgatacggtcggtgataccttccgaatcaaacttgacgagtgatacagaagccgtttcctgtttcgcgtctttctttccggcagtcttttcagcagccttcggggcctcactctcactgtcgttcttcattccggcatctttctgtataaaaggtgacggggtatctttcgagagcaaagcaagataaactccatacatattattatagacatggttccattccaaccagccgtatgtagggttgaaatcgcgggcagatgagaaaatcagatacttaccatccgtactgaataccggtgaagaagaattataccacttgtccgtcaccggatattccttctttccggcaatatcatagacatatacaacagttatttcattatctgcatcacgggtataggtcagccatttgctatccggtgaaaaagtcacatcctgcggttcccccatcgggtcttgtaataacatagtcacctgtcgtgaagctacatccagcagattgatacgattttgacggtcggtataaacaatcttcttactgtccggactccattcgaaagagcggatatacgtatcattattcttggtcagctgcaccggattaccttctactgcatcctgaagataaagttctgtctctccggtagcatccgagatataagcaatgcattttccatcaggagaccattgtgcatcacgttcgtgggcacccggagtgcgggttatatttttcgtcacacccttagtcgaaggcagattaaagacctctccgcgagcagtcaccaccacccgttctccgtcgggagatgcgctggcggcagtcagatacttagctccattctttatggcgctacgagcatagatattatccgaagcaagactgatatttactttctcaggctgacgggtggcagcatccatcttatagatatatccgccattctcaaacacaatggtattgccggaagcactcgggaactttacatcatattcggtaaagttagtaaccttcgacgtctgtttagtcttcgtattataaacaaagatattcatggtgcggtcacggtcggaaaggaaaaatatatcatcgccgatccacatggggaagatatcctgagcaacattattcgttatattttccactgatttctttgccggatcgtatatccagacatcatccgccataccgcctttataatacttccaagtacggaattcacgcatggtacggttgtaagccagtcgcttaccatcgggagaataactacagaatccaccctcgggcaaagggataatttcgggcataccaccctcttgattgacagaataaagcttaccggcaaaaccgtcactgatacggttacgataaatgatctgtttaccatccggtgtccaggtcatcacaatattgttaggtcccatacgatcgcccaggtcatcacgggaattcgtcgcagtatacgtcaggcgttgtggttctccaccggctgccgggatggtgtatacttccgtatttccatcatactgaccggtaaaagcaatcgttttgccatcgggtgaaaaacgagggaacatttcgtaacccacatgcgaagtcaggcgctgagcctctcctccagtgacaggcactctatacaaatcgcctgcatacgagaaaacaatctcgttcccgttcgttgccggaaagcgcaataaacgcgcttcatctgctgccgaaagacagacagatacacctacaagggcaaataaggataaaagtaatttcttattcatactcttaaaaattaattgacttacaaaagtatgaaaagaaaaataataattacacaaaaagtatacaaaaagatcaatcctgccaattttcattcaataaaaactccgaaatatgcttgtgcctcaccccctctatattgtcctgccatatttcatccatactcactacatatttgggataatggtcattaatggcaagtaaaggtgtaaactccctgtcaatggtggcctgcgatgccaattgataagtgacctgaacataaatcttctcttctctgcgcaatgccacgaaatcgacctccttatcatcctgcttaccaatgtacactttatagcctctccgcttcatttcccaatataccacattttccaacgctccagctatcaggcggtctttatatcccattaccgagtaaataagcgacaaatcactcacaaaatatttttcattggtctgcagcaattctttcccttttatgtcgtaacgctgcacacgctgaatgataaatgctccttctaaagcactcaaatagttataaatagtattaatatctaccttacgttgctgatttttgaaataatcggcaatattctttgcattcaaacgattaccgatattatcaaaaacaaatttcactattcgttccagcagttccacattacgaatgccatggcgttgcaccgtatcacgcaaaataacagaagaataaatatcatacacaatcttataaatagcctcataagtataatcagccgtatgaatagcaggaaaaccacccatacgcaaatatttccgaaactcctcatgaattcctattttatcttgaaacaaggacagaccatgaaaatccagatactccctgaaagagagagtcataatatgaaagtcaacatatcggccagccaaataagtagaaagttctgaagaaagcatacgggagttagagccggttacataaatatccacatcccaatctaccataaacgaattaactgccttctcccaatgttccacttcctgtatttcatccagaagaatataatatttctcctttgcacttttcaccacattgctgatatggatatataaagctttagcatttttcacatccatccattcgaaactctcaaagttcatgtaaatgatatggtttttatccactcctctcttcatgagttcctcacggattaattgcaaaacaaccgatttcccgcaacgacggatcccggcaatcacttttacaaaaggctggtctataaagggaatgatttgctgcatgtatagttctctatcaatcatatcggcaaaatgttttagggattacaaccacaaagatacactatttccggaagacctttagggttataccccgaagaaaaggattgttttcgattttttttagggttataccccgaaaacaataacaaaagcaagaaagtcttcgccactttaagtacaactcaaccgatgctctgattattaacaaattctccgggtttaataccgaattgcttttggaaacatttggcaaaataagatggattattaaaacctaccatatagcaaatctcattgatccggtatttattctctgaaagcaaggcagcagctttctttaacctcacaatctgaatcagttcattcggagtaacattagccagcgtttttatcttggcaaataatccggaacgactgatgcaaagttcttctgccagaaaatcaacagacagttccgaatttgagaagttttgctctataatctcattgatacgggtaaggaatttattatccatagagttattggcaatactgttcaacggtaccaatggcattttagagaatttctgacgcaacaaattacgcagatcaagcagattcttaatacatgcttccagatactgcaccgagaaaggcttttcaatataagcatccgccccgcagtccataccttctatctttgaattcgtatccgttttagctgtcagcaaaataaacggtatatgactgatggcctgatcggcacgcaaagccttgcaaagttccaccccatccatgcgcggcatcatccagtcgctcacaatcagggtcacatcattctctttcaacttttccaaagcctctatcccatcttcagccgtaagaatagagtattgattagagaaattgccggaaaggaagttcagcatttcttcgttatcatccacaatcagcatgaccggtttatccttagagaccgccaccggtaagctttccgacaaaatatcctcgggaattgccggattcaatccattcgtttccccttcctgaattgcctcctgactttgttcgatgggcaatgttactataaaggacgatcctttattgacttcagactccacttctatgcagccattatgagactccacaatgcttttcacaatgctcagtccaatacctgtaccgggtttattgtccatggcctgatagaaaggtttgaaaatcttcttctgatcctccttacttataccgattccattatccgttaccctgattacaaatgtatgctgttccggttgcaccacacacgaaaggataacttcatcttttgtatacttacttgcattcgtcagcaaattactgataagctttgtgacagcctcgctatccaccatagccgtaaaattcgcatcgggatactccaccgtaagatgagcaccatgttgggtaatgaaaggattaaaccgttcacaaacagcctccagcaattgacgaatattctgtgaggtgtatttcatggtcatcccctcctgttccactttgcggaagtccaacaactgatttaccaggaacaataatctctgactattacggtctataatattaaggtcatcacgcagcatcgccggcataggtatggatgatctcataatcttttccaacggaccaatgataagcgaaaccggagtacggatttcatgagctatcattgtgaaaaacttaatcttagcctcatgcacctctttctctttattcacattcagttgcttaatttctgctgtatgtttcttttcactccttttcagcagaaagcggatgaagaaagtcaatgccacacacagcaacaggaaataaagcaatttggccggtagactccaatagaaaggcggatgaataactattttcaggcttgcttcctgctcgctccagataccatcgttgttagtagctttcaccttaaaagtataggttccggcaggcagattggtataagtagccttattttgagaacctacataattccattctttatcaaaaccctccagtttataggcatactgattcttttcgggcgtacaatagctcaatgaagcataaagcaagctgaagacatgatctttataagataattccagctgttccatatggttcagagccttcggcaacaacttatcacctatccggatctctttattgaatacttccagtcccgtaataattaccggaggaagtaccttgttcgttttaatctgataaggatagaaagcattaaacccatttacagaaccaatgtagattttcccatcggaagctttcaaagcagcattcaccagaaactgctcgctttgcaatccgtcgcttcgtgtaaatacctgacaactttctccgggaacatatcgcaccagcccttttgtagtagtcagccataagacacgctgatcttcaataatagcacaaatattacggcttggaatatccaatggaattaattcaaattggtcttcctttgcattgtatttgcaaagtccgttcatcgttccaatccacatttccccattaccatctatcaatacacaattcacctgatcattaatcaatgcaccgggggcactgctatgtacataattcgtccattcctgcttatccggatcatacttgaacagcccgtttccctgagaagagaaccagatatttccatcggcatcctgatctatgtccatgatccaggaaccaagatctcttattcgggtaaagttatcctcttccctgttatacaagtttactcccgacatggaagttacccaaatacgtgcttcacggtccttaaagatagcataagaactgcttctatcaagggtagtgggatctcccgctttagttgtataaaccctgaatacccctgtctttgtattcaacacattaactccccccgtataagtaccaatccataaatcatcaccatccatacaaagtgcatgtacgttatgataagaaagactatttccgtgctcatcgggtagataatgagtaaagtgtttatctttaggtgaaaagcaactcaaaccaccatcatcagaggcaatccaaatatgcccgtaagtgtcttcacaaaagcgtccgataacagttccattgacagaattggaaaaacgagaatgagcaaagcactcaaactgcccggtattgggtgacagataattcacacctccatagaaagttcctatccagattccaccttcacggtcttttacaataggataaacaaaacgattggacaaagaataaggattcgtttcatcttctgtaaataattggtgttcgcatgtaagggtattaaacagtaaaagcccgtcatccgaacctatcagtagttgatggggagcatattccatcaaagagtgaatatgcgttgcccctttaccatccgacgggtgcaagtaagtagttgccttaccggtataccggtctatcttttgcaaaccgcactcccaagttcccaaccagagtgcatgttcagaatcttccagcataaccaaagagttggaatcatacccacccgtgtcgtaggtaatatggaaaggctcaaatttattctccgctttattcaacttagaaacagtcgggtttccccaattagtaacagcccatatttgattttcactatcaatcagcacgctggccattaacccatcggcatctttaaactcataatgctccaaataatgtttggatacattatatttgaagattccctgacctacggttgaaaaccacaaattaccatccctgtcttcagcaatatgattcacattggttttaatgctatctcctttagcagtcagaagcttaaacggttcaaaactttctgcctcataatcataaatataaactccgtcccctgttcctatccaaatcctatctgtagtatcgtataaaaatgaaatgtaatcattaactccttccggattcaatctgtatattttaatagtggtaccgtcataacggttcagaccatcatctgtgcctaaccacataaagccatatttatcctgcataatagcacgtacagcgctggaggacaatccatcttctactgaaaaatgacgaaaccaaaaatcagtagaaccggcagaaagcatcagcggaaccataacagctataatcgcaaggacaatctttttcatttctttaccagatattggttgaacataattcccagtacaatcaatatgaggccgatatacgttgtaaacacaatttgttcactcaatatgattgcaataaagaacaaagacaagaagggagacagatagcaaagctgattgaccagtgccggattcgtagttttccgcatggcaaggctgaaaaagatgaaagggatacccatctcaaatccgccgacatacattcctgacaagataccgggcaaagtattcaagtgaacacccactatcattgcgccaaccagcaaatatgccgtaccaaacaaaaagctcataaacagtgcaacgctaccatctgtccgatccttaaatttattatttatcatccagtacatagcccacaacaaggcactcaatgctgccaacaacaacccatgaacaggtatatccatgccacccgactgcccggttcctacagaaataagtactactccacccagagaaataaacataccgatatatttcttcggaggtatgggctgacgggcaaatagggccagcaaaattaatagcacaataggccatgcataattgataggttgagccacttgtgcaggcaacaaatcataagctttaaacaacaccagataataagccactggattcagtaagcctaataatgcaaaatatccccattgccgggtaggcaatgcagacagtagtttccacttcttctggaaggtcagcaaaagggcaaatataagtaatgaagtacaactggctatcaacaacatctcaaaatgagtaagatgcgtcaaagcaattttaaaagcggtggcaacagtagaccaactaagcaccgcaatacaggcataaatgatagccctcgtattgttacgactatttacataagttgcccttgcaagcatagcattttgtttataaaggtttacttcctgtaactttgatgcgatatggccattgggcatctttttcctccggattgggattcatccaatgttcagtaggggcacccatcacaaccagccacaaatgagtcaaattatttacttttggagctgtaaaaataatactttttccgctattatcactcacatccccataaatagatttgccatcctccgttatagctacaaaaccataacgccaatcggctttatccgtatgaattgcattatatccttcctttcctgcttctccacagaactctactttcactttctttccctgttcaggtaaagctaacggaatagcattgaatccataattctcgggacagttgtccggtgcgattccataccatccgtccgatagagtggttaagctggtagtatatttattggcatacggtcgagtttctttccatacacgaggaaaatcccaattgataaaatgacgatgagcatcaaacatttcatcacagaattgcttctgatctaatccggtcatccgcttgtaagttatcaccggatcttctccctgcttaccttgacgatagagttcggcaataaaaggcaatcctcgtttcataccccaatattccagtacatagggagaatgatagatattttccaaatggagataagctttatgagtcagcttcatgaaagcatcccaatgatatttttcatcagtgatccattcgggatttacttgccataacatccactgcgaggtcatttcaaagaaaccgcatcctccccaagcctctccttctccatcacaactgatctgagcctgaaaactatgccccaattcatgggcaatgcaattcagtttcttatcctgcacacgattgggagcaatccataatgcaccgatttctccatcataatcaccaccataggcagtgccttccaaagagtagtttagcatgaccatcatacgatacttatcacactttgaacccggtttggaaaactttaaggtatctcggaagaaatgatagaaactttccaatttttccgttaagttcgacaaatccactttcatatcatgcccttccaattgaggaggattagacagatcatttccaaaacctttttcccagaagatgacgaaattatcagtatatgccatgcggtgataactccatttactatcaggattctgaagatccatggcctgcaagtctttggggatataaatttctttgccggaaggcatagaaacagatgttgcctcttgcgctgtcaaacttagacaaattactaaaataaaattagataaaaggatatacttcttcatattattttctattttgttcctgacggataattcttaataacagtatctaaatagtcagtacgctgttgaagccattgtctcattcgagatatctctgtctgataatctttgtcaataggccaacgttcagcattccgtttcattgcttcggaacaagatgttacaaagatattcgtttccttccaaaagtctgacattattttgtccctgattgtttgccaacgtgctttatactcactaacaaagcgcttatttttaaataaatcagtgaagaaagagggtacataataacctccgatatgactggcaggatcagtacctaataccaattcacgataactagtgaaaaaattgtgtccggtatacatagttccccaatcgaagtcaaaaccggcatcaaagtcccaaaacggccccattgtccagagtccttctttgtctttatgcatataaatactacgaggggcatccacttccacattatagactaactcctgtatcagcatatagtcaataaacgaagcaatattcattaatttagaggttgcttcataattactttcatatatgctttgttccaaccgggcaaaatcattttgtactgctttcagttggttggtagtagcatcctcaggatatttcacacagatgggcatcttgtaaactgtcgaccagaaattatcccctccatccggattaagctccggtccgtcatccgcatccagcgagatcagcattccttgctcatcatccaccgctacacgactactgccctgttcaacttgttcggtcaattgataaagtccaatataatccccattcagtgtgacttctacataacgagaatgattggtataaggcaaacctaacttctcacctacaataaatgtaaaggtattcatcatttgagtcggatcacggtaattggcaagaagtacccagtccttttcagtagctagtccaagtatttccgattttttattcaactttatgcgataaggtttcttcggataccaaagccaggtagaatttccacgtccacgaatacgccctgttccggtataatcccattcttctttttcagaatcaatggtgagagtacaattcacataatcttttttgttctttgagacaataggagcaccattttcagtgtcgatggtcagtcgggcgacttgatatatagagggtgatgggacttctagcactatcgggcaaggaccaacagtccctgaatcatcagagcattttgccaaaaacaaggataaacaaattaaaccaaacaaatttgaatatttcattaatatacaattttaaaaagtaacctaaaaataagaattcaggctgcatatcttctacattagtttatttcagtaatttacatatctatgaatctaccaagaatggtaagggggatgaataaacatccccctatcaatcatattatatggaataaatacttcaaaaccttatactattctataatgaaattaaatttaagagtagcaatgtattccttaccatccttggtatagacaagttcaacaacctgaggataagtttctccagaaatgagagcacctggcataaaacctacctccatgtcatagatggtgtggagcttggtataagtacgtgcatttgctccccatccttgcggttcaccgacagagttacaccagaatccacctaattcaccagtacagttgtcttcgtaactataagcaccatcaggtaattttaaacgcatacaaatttttccttcaaccaatccgttagagctatgatgttgaattgcagctatatcctctggcatcagacagaaagcatgacagatggctgcattatcgtagtaggcgatgttataacgagcgaaatcataagatgaatcagctgtaccacgcacattaataatcatctcaacatttttaggcttggcattcggatcaagtaccacttcaactacatcattataactttccacatcagtgccactcaaagtaatagtgtaaggccattgctcatcatcagcttccttatcattccaatactgacggttatattcatcgggagcagccattataacgaaatagagttcatcggtaccagtcggtactgtgtataaagccgtaccttcggcacctttactcatttcggaataggtcggtttaccatttactatagcaacataaccataacggtagtcggatgaagtgttattcaaagcgttgtaggttgtggttttagacacaacttttccatctccgtccacctgttcgcctttatctcccttagcaagagtacttccaggagtgatagcactaactgtagtggaaactgtagcaccagcagcaggcactttcattttaataacattgaagccagtagttccaggacaactcgcatacccaacttgatatttgagatcgcccaccttgtataaatcagtactataatcaccttttacatgatcaggtacagtcactggtttattatcattattagcaaactttaagtcataatataccatacgtgaagcatagtcgtaaagatcagcatagagaacgtccttatcattgccgcaatataaacgctggtaagtttgtagtgggtcttcaggaaattccgaatcacgccagatatgtccataagcattgataccatgtttctctacccatatatgctgcaaccagtagcttgcatagcgcatccactcatgattgaagtgacgatggcagtttttcttccacacatcgagatgataaccaaacatttcttccggatagtctagctgagcttgccattgtgcacattgctcccaaaaagcgcaccccccagcaccatcaggaccaaaaccataacggaatccatgatgcaaatcagccggatattcttgtttattcactttatcagcataaacctgatattggaatgagtgacctatttcgtgagctatagtagaacctacaggatgacaagtagacgggttcacccaaagagcaccaattttatcatcataaccggaaccggtagccagccattcatcctgataaatcaaataaatctgcattttatagtcatcaagcatggattttccttctccaagaacagccataccaagagtattaatattagttgtgaaatattgttcagctttctgaagtaaatcatcaatatccacccacataccactactctgattttccgcagagttgggatcgtttccaaactcaggcgaccaaaatacaaagaaatgttccgattgtttcatacgatgccatgaatagtaactatcatgacgcaacattgcatcaggaccattttcaaagtgcggattccaatctccaggacaggtatacttttcataatcctcaatttcagcaggatcaagatataatactttatagttctgagcaatagtgattgaacttgaagctcctttttctgtagatattgtcactgtagcagtacgagaattggaaatatcttcgttttcctgtaaagtcactgtaatagtctggtcttctccagcatcaccgctttcaggcgagattgaggcccactggcaagcattaccttcgctatcaattatcgcagcagtccacgccatgtcggatttgaaagttatcgtggcggatttcacattggattcaagattataatcggttgcaccgaattcaccaattgtacctttgtaacgaggatcataatcaggttttgactttgacatgtcgtcatcctcacaacccattgcaagcaacaatgtcccacttacagctattacagaagctattaagtgaaaatagtgtcgaatattgtatttcatctttttagttttaaagtggttcttaattatagcattgccattatgccaaaacacaatggcaataaccttcctaaattattattattcaaaagtagcagtaataaagaacgatagcatctttgactgatcactgcttgctacaccaaattttatcagataaactgtacctgatgcgacgccaggagcacgccctatagcaaaagtcgctgaatcatccccaatattaggctcaatgaaataggagaaaccatcagccccccaagcacaaatctcgtttttggaattacaccagtagcccccattattagcagttgattcaccatcccacaaataagcgttagtttcaagattcatcatgtatagcttaagtacgccatcactcaaactatttgcaaaatcagctgaggacattccaaatacgaagttaatattttcagcaacatcgttaagattaagctgataagcattataatcaccagcaggaatctttatatccataaatatgaagctccggtcatagatagtaatagagttaacaaagcgaatacctgtattataattaggaccattgagagcaaaacctatttctatggaagccgcaccacctgcatttttatcagcataaaaattaaaattatgggataccggatcaaattctataataccatacagtgcttcatcatcagccttacatacgttacctgacttgttaacataccatccatattgtttcccatccacattcgctttcgccttgttccatacattacgagagggattaatagggcatactacaaccgtacctttctcaatattggtaagcatttcactcacagtcataccaaattgtttctggatgatatcttcatacaagtcgatattcagtgatatcggcgttggattagtaccttgcatctcataaacattggatattgtagaggtagcatcgccctttacaggtggattttcatcaggtccatatacatgaggacttgtagcatcctcataatcattggagcaagcagatgcaataaacaaagcaccgaaaaccatcaatgcatataataattttcttttcatagtatttattattttgtataaccagggttttgttttaatttaggattagcatccagattatctttcaagatcgggaatatgtctaaatggcggtcgttcggattcgtgttggcactcttcccaaaccatgatttaccattgaatacattacacccattggtcatcttgaaacgtatcaagtcttgacggcgatgatgttcatatacaaattcccaagcaagatcatcgagcaatccaccaagaataatatcatctccgccttcgtgagtttcaataatttcaattttagtaaggtttttgtcttcatcaagaacaccttgcgtctcgcgcaatccataatcatatacgctacctcccttaagttgagcaacggtacgaacagctttttctggattatttttaaatgcacgtctacgaatcatagttacaatatcagctgcatcttgttcagtttcatctttataacctccaagacgaagcagacattcagctttaataaagtaagcatcagtaaggcggaagaaaggaacattgtcatcacttgtaccgatatcacccggctgaatctcataaagccacaagcgtgccccttggtagtcaccggcacccggtttttcgattgcccaaacttcaggagtcaggttaacctccttaccattgtcataaatgatgtttccttgtgtatctctttgtacaccccatttccaagtatcggctttgcgtgtatcagcgtcatcataactataaaaaaattgaggaacacaagcactaccgttccatgggtcaaatgatactccaaacacgtctttacatacagctgggaaccacttacaaaagtgattggtaccatgtcctgcatacttgttatcatacatcagttcaaaaatattttccttacttccagccactgaaaatggttcacgataactatctgcaagtgtataaacaccgctattaataacttcattaacctgttcgattgctaaaccataatatttattgtcgggcgcatcagggaaccaagcatcgtggttaagatacatcttggcaagcaacatacatgctccataataattaatctgtcctttttctgctacttttgtcagcaaaggtttagattcttccacttcttttacaatgaaatcaaaagtaaactgaggagtctcttgctccggcgagaatccatcgggcacatttaaagtagtagtaaccggtatattacgccataaatcgaacagcacatagtaaaatagtgcacggaatgtacgaagttccgccacggctgtttcatttttattaatggtttcattgtccaaaagttggttacatgagtttatcccctgataacaggaataccacggacgatacaagtggttaatcgtggagtggaattcatgcttgtgtaaagccacatattgggcaccccatccaccataagtacgatagggagtcatgagcaagtctccacattcctggctaatatccatatacccctcccaaccatcgtacatatcacggagacggtcgtagataacaccatactgtgcttgtatctctgtatcagagaattcataactgccatctccaggaagctcactgaatactttttcatcaaggtcagtgcagccgcaaagtacaacagaactggcaaacagaatgcctattactttgtttttcaatatattgagtttcataatcaaaatactttaatcagttagaatgtaacattaagacctacagtgaacgaacgaacagtagggtatttgtcgcggtcatctacaccagcataccaaaagttattactgccaagttcaggatctgttcctttatacttagtgatagtaaacacattatcaatactaccataaagtctaagagttttcacataaggactatgcttaaaatcaaatgtataaccaagagtcatgttggtcaatttgaaatagtcaccgtcttcaatgtaataactggtcaccgcttgtacttgctgagctgaaagcggacgaatgcccccaatcttatcagcagctgacttcaatttgttataagcatgtgcattattctcataaaatacacgttgctgattaataatcttgaagccaaattgcccagtagcttgtaatgcaagatcaaagtttttatatctgaaagtattattccatcccatggaaactttaggaataccattgcccatacgttgataccagccgtcacgatcatcacgcatttcctgatagaactcggcaacttggcctgtcgcaggattttcaatcaaaaataatccagttgcttccgaaacacctacagctttaagtgaataaatctcaccaaagctcttaccaacctcaaccttgtgagtatattgtgatacaggatcacctacccctctcaaccattgaatattttcagtttggtacaaatcattggacaagctcacaagtttattcgtattatgttgtaaagtcaatgcagaactccattcaaagtcctttgttctcacgggaataccacgaacaagtatttcgataccagaattacgcatcttacctacgttagccatagttgacgtatgcagatttgggggactcggtacttgataatcataaagcatatctgaagtattcttgatatagtaatctactgtaccacctaagcggtcattcaacacactccaatccaaacctatgttgaattcctttgctttttcccatttcaagtctgggttcggattggatacagctttcaaacctttcgaccatttaccatccctatagtaattacctccactaaacgtgtaacggagaattgagagataaggatcattcggaatcaccccggttataccatatcctgcacgcaatttaaagttagtgagccagtcacgggtattctccataaatgcctcgttatgtatattccatcccaaagacacagaagggaatgccccccatttatggttagcaccgaatttcgaagaaccttcataacgaatagatgccagaatattataacgatcatgataaccatagcttacacgcccaaagaaacctataagttttgattcatttttcttactagccatagtagcttttccatcagtaaggtattcaccggcacctatattgttatatccgaaatagtcggtcggaaaattggcattccacatagaagcttcctcatactcacttttagaccaactataacctaccaaaccttccaaacgatgtaccttattaaaggtcttgttatacttggaagtcagttctaaataatcagtccgactctgagaatctcccaacgatgcttcacctgtacgattagcaataacagtagttgtgtggtattttgtattatacgaacctgacttaccaatacttcgatgcgaagcaatcattaaattagtctgccatcccttgattggctcaaacgtgatatttccagtcatgcgcatgctttgtgacttgttctctcccgtattctcattttgcaacgacaccggattataatattgcaacagtgaacgctcattataagatccgtcttcattccaaataggcgatgaagggttacggataaccgcttgtcggtatatataagtcgcattattgatgtcatacttatagttatcagaaacaatattcaaattaaccttcaacatatcattgagcatccaatggctgacatcaaaagacatactcaaatcttcatttccggttttcttcattacaccttccgccttacgataagagacgtttccatagtaggaagttgatgaagagccaccagttatagtaaaactatgattctgcgtaactgctgtgcggctgacagctttcagccaatctgtatcataaccttcgtcattatactgtgttttacctgcacgtatatcttccgaagtcataaagtcagctttcttcgcccaattggagaatgatacataaccagcataagtagcagtggctttctgctcacgcataccagtcttagtagtaatcaatatgacaccgccagcaccacgtgtaccataaatagcagcagcggaagcatccttcaaaacatcaatagaagcaatattctctggaggtacagtaccaagatcaccaggaacaccatctatcagcacgagtggggaagcattacctgatacagatacgataccacgtaaacttatttccgtacctgcgccaggatctcctgaaggtttagttattgtcaaaccggcaactttacctttcattagttcaccagcattattaaagttaccaactaaaaagtcttcagacttcacacttgcaatagcgcttgttacatcacctttgcgctgtgtaccatagccgataaccactacttcgtctagcagttccgtatcttcgactaacactacgctcagattgcgattagcacctaccgtaatttcctgtgattggtatcctatgtaggatactaccaatatcgcactagcatctttaactttcaatgtgaaattaccattaaaatcggtaattactccatttgctgttcctttctcaagcacgttggcaccaatgaccgtttcgccactcttgtctttcacaacaccagtgattgtaacagtctgttgctgtacaacctcgatgtccatctctcctgccgttcccggaaatgcaaatgccggactaacgctggcacctgctgcaagaaaaagacaggttgtcgcctttaagacagctttgctgaacaaggctcgattttcatgtgtcttcatattacatctttaattaaaaggttaatattttattacaagttacaaattcttaatttttaaaaatggattagtttactttccattcaataaccccacccgatgcacctttctgcaattgggcagctattttcagttctgtcgttttcaccggtttgaaatcaaggctgttgtagcagtctttctttaccgtatattcgttcaaagcttctacttctttccagcttttaccatctttatagtagagtttccaactttccggcacccggaaatccccgtcataatgatcgaaatccaaccagtacacttctacgtttgaaattgtataaggttgatcaaattgataagccaaagtttcctgtgttccatttctcaaccaccagtagtgataaggtttggaaatatccgatgagcgctttggttcccactggtcattcacaccccatgcccaggtttcaactgaagcagattcaggagcatctttctggataggtgcttgtatcatcagtgtatgtgccttgctggcgattgttggctccagagtaggacgggcatactctgcagtttcaggaatccataccgccatctggtctgcaccacgattattccaagtggaataaggaatggctttgaaagggacctccttcacactaccatctttttctatttccttagccgtaccagtcaacaccatgacaccgtttaataaatcagcatcgtaagttgcctccattgatgttccgtcaggaataaacttattaaagacaatgctgtcagcctgatctttaccttccaggcagaacatgattggaccacgctcaatagcaagtttaccacggtcatcttctacattatcattcgctttcacacggcggacgtccatcgggaaattaatttccacaacatctccagccttccagtcatggaaaatcgtagcatagccatccatctgcgcaacatttactttcttgccattaatggagatagtgtaagcctttgctttatcagtaaacgcataaaggtctgtaggtacaggagcatcctgtgcccatcccggaatacgaacgcgcaaagcgaattcctgttccttttcgggattaacggaaatgctgactttaccatcccacggataagttgtggtctgttccaattttatattgttagtttccgtattcaattcggctttactctggatatagagattgacataaatatcattgccctgagtagcatacatataaaaaggtacagaagccatgaaacgcgtcacattacccggacagcaagcgcaaccaaaccagtgctgacgttcatgttgtcccatagactcaagtggattatcatagaaaaatttatcgccactgagtgaaacacccgaaataactccattataaagagcacgctccagtacatcgacatacttggcattgcccgtagccaggaacatgcgatgattccaatatacattggcaatggcagcacaagtctcgcagtatgcggtatggttattcaattcatagttaggaccaaatccttcaccttgcggacgtgaaccgataccaccggtgataaagagctttttacttgccatattttcccagatacgacttaaagcattgaaataagcagtatcctgagttaatgaagctacatcggcaacaccggaataaagatatcctgcacgtacggcatgacctactatttcatcttgttgcagaataggtttgtgatcctggctgtattcgctaagacgatgtccgtctgttcctctaccggtttcctctacaaagtatttagccatcttcaaatacttttcatcacctgtcaccttatataatttagcaagggccatttcagcgataggatgaccggaaggaacatgcttttgtccttcattcggaccaaagacctgacataccaagtcggcattcttgatagctacatcaaggagattacgcttccctgttgcacgataatgagcaacggcagcttcatacaaatgaccgctattataaagttcatgactattaatcttttcccaacggctctttccccaccaaccggaaaggcgatagcatttattagtaacgcaagtggtaagatagccatccggttcctgagcagcagcaatcaaagtaataacgctatccagataagcatccagcgctttatcatacttcacagccagcgaataagaggctccttctataatcttataaggatcggtatcatcaaaagaaaagtcaccgcgatgttctcccttcatcagaccaccggctatggcaaagttatcgaagcgcccgttcttctcacattctttaaatgcggaaggaatagaaacagtacggttcgtttcaatgcgtggagtccagaagttatcattcaggtgaacttgagtaaagggaacttctttgatcggtgcatcgggcttaacgtaggaattgctgcaagcactcatacccagaagggcaatgctaccgaaaaggaattgaattcgtttcttcatcatactatatatgtgtttttaaatcattagcattagtgtacggcaaaggaaagggatttcctgctaacaggatgaaaaaataatctataaggataaaagaatagtcgaagcacgaggctccaaaagaagatttagattattgttttatcccattggacgatatttttaatttccctcgtttcacatcatctcttcactttctacttaccttctccttacttactccctaccttctccctacctactcctttctatatataaggagaaggtacaaagaagctacgccctaaatacgagataaataagaatcagataagcacacgcaaatggatgaaaaaataatccaatcgaatacaagaatactacaaacagccattgagaaggccatagaaaggcatcttttggactattcttttattacattatattattcagtccttccgttcgctcttttttcttttactttgcagacagacaaataagaattaaccgaatcatgaaaaacaacctctctttcaaattagtcgttatttccttatttatgtattgcggaaataattcactcgaggcagcatcaggaaagaaatacgcactggcatctcccgacggaaaactgaaagtagaaatcagtaccggagacaaattatcttatcaggtaatgcacgaaaaggatacaattctctctctttctaacataggcttggttctggctgacggaaccgaaataggaaactattctcaggtaacaggtataaaaaggaaaaagatcagagataatgtagaatcccctttctaccgcttcaaggagttcgttgctgcatgcaatgaacttgacttgaagttgaaaggtggttttggagttactttccgcgcttatgatgatggagtagcctaccgtttctataccacacgtacagcagctgttacagtcaaagatgaaatagctgaattcaacttcaatcaagattatacagcttatcttccttatacgacgaatgacaaaaagccgatggcaatggcttttcaaaacatatacgatgttaccccattgtcgaaggcacagccgaaagtagctttcctacccgttacagtggactgcggtaaaaccaaattaactctactggaatctgatcttgaagcatatccgggaatgtttgtagaatctcagaaagatggatatgggctaaaaggtgtttttgctccctgccctacccaaacagatttctatccttggcgtatgcaggagtatgtaacagaaaccagtgatttcatagcacatagtagtggggcacgtacttatccttggcgcgtactggctgttacagaaaaggatacggatatgcctgttaataatctggtgtatgcactggcatctcccaatcgcataggtgacacatcatggataaagaccggaaaagtggcctgggattggtggaatgactggaatctgaaaggtgtcccctttaaggcaggtatcaatatggatacctataaatattacatagacttcgccagcaggaatgatatagagtttatagtgctcgacgagggttggtataacccgaaaagcggtgatatgctgactgttattccggaactggatcttccggaactgattgcctacggaaaacagaaaggagttgatatcattctttggacagtattcaatgtactcgacaaacaactggaagccgcctgcaagaagtactccgaaatgggtatcaaaggcttcaaagtagactttctggatcgtgacgatcagactgccgttgaaatggtatatcgtatcgctgatgctacggcaaaacataagttgacactcgacctccatggcatttacaaacctacaggtatcaatcgcacttatccgaatatcatcaactttgagagcctgttcggtatggaagaggtgaagtggacggatatcaagaataacatgcctctctacgatgtgaccttcccttatatccgtatgatggcagggccggtagattatactccgggggccatgcgcaatgcaacgaaagccgactggcgtgccgtctattactcaccgatgagtatgggaacccgttgtcatcagttggccgcttatattgtacacgattctccgctcaccatgctgtgcgatgctccgacgaattatctgaatgaacaggaatgtgtggacttcatcacttcaattcctgtggagacggattctacctttatcgccgcaggtaaaatgggagaatatatcgttagtgtacgaaagaaagatatcaactggtacattggcgggatgacaaactgggatgaacgtgacgtagaacttgacttttcgttcctgccttccaatgttcgctatacagccacactctttgctgatggtattaatgcgaacaagcaagcggaagattatcgtacagagaaactgattatagataaaaacagccggataaagctacatttagcttcgggcgggggattcgcgatgaagcttgagttatatccggtgcgaggtgaagtaacgtccatacccgagggaaagaatattccttctttttataagaaatacattgaaactgagggattatatgtcacttcttccgaaagggtaagtgatgaagcgttgttgaaagcatgtgatatcatcagtctgatgctatcaaaacgtccggatgtaaaagcgcatatggtgaaaaaaggttgccatgtgatggttatcggtaaagacgaagaaacttgtgatttaccggagtttgcacatatctgcaattcgccggacagcattgcatactggaactggcgtgcccgcggattcggtggggcaccggaagatgagttctccgccagttgcggggaagagaatctattggccttgccacaagataaatatacgggcgagaatattctgattcatgaatttgcccatctgatacatatggtaggaattgcaggtgtggaaccgaatttcaatgaccgactggaagcattgtggaaaagcgctggagaaaaaggattatggaccgatacttatgcattaagcaacaaagaagaatactttgctgaatgtgtacagtctttcttcaactgtaaccgttacgctgatcctgccaatggtgtacacaactccatgaaccgtcgcgtaaagctgaaaacctacgatccggaaatgtacaagctgttgaaagaatatttttatgaaatagagataccgattaataatgaaatacacaaatgacaaattagtcacgtagctattgaactatcttaattcccctcctcctgggaggaggggtgcccaaagggcggggtggtaggtgagagaaaacttccttaattttattattaataggcattttattgttacacctaccacctccccctacgggtactcctcctcccaggaggaggagaactgagatacttctaattatcattttcctactaatttatcatttctcaaataacaaaaaccgatatgaacaaacttgtcctcgtaatcgccttccttttaataggaaccatttccgcctttgcacaggccgctttcaatactcccggtaccggcaatcccgtaattcccggatatttcgctgaccctactatcaaaaagtttggtaatacttattatatgtacgccactaccgatggcagtggtgcaggctttggccccgcacaagtatggaccagcaatgatttcgtaaactggaccttgatgcccatgaactggcccgacagtcactggatatgggcacccgatgtgatgcagtactctgatgggaagtactactacttctactgccagccctgtatcatccattgcggagtcagtgaaactccccgtggtccgtggaagaatatcctgggtgatagcgaagccgtccttatccccgaccgcttcgtaacaaatgccatcactctggatggacaaacatttgtagacgatgacggctcagtctatatgtattggggaacctggggcatttacaaaggtttcggttgcggtgccggaaaattagctcccgatttaaagagttttactgaaacccgcctcatccccaataccgaagccaccgatttcttcgaagcaccttttgtaatcaaacgcaatggaacctactactttatgtattcctccggttcctgccacgaccacacatatcgtgtacaatacgccacctcagacaagcctctggggccttacgcctatggcggctgcatcctcgaaaccaatgctgacggtaccattcacggtcccggacatcacagtatcctccaggaaggtaatgattactatatcgtttatcaccgccacgataatccacactccaaccgtggcttccaccgccaactttgcatcgaccgcatgacattcaatgcagacggaacgattcaaaaaatcacccccacccatgaaggcgtaggtgcactggctccttccgttgttaaatcaaccaacctcgcctttggtaaaagcgtgcgtgcctcttcctcttatgatgacaacttccgtcccgaatatgccgtagatgataacaacggaactttatggcgtccgtgcggcatgggacaggaatggcttgaaatagacctgggacgcccccaacagatacaaacgatctggacacaatttgaatatggcactcagttctatcaatacctgattgaaacttcaacagatggtaaacgctggactatctttgccgacaagcggaacaatcatctggcaggcagcccaatggtagatttcggaaaagccaaagcccgcttcgtgcgcctcacctataccggtggacaaaagaatggcttcggtggcgctatctggaacctcaaggtattttccggtatcgaagactccgccccccaacagtggctcggactgacggccgccgactggaatggccgccaatggcagaataatgaaggaatgttaggaggtgcttttatccagaaagcaggatcagctcgcaccgagcgcattgacggacgcgacgcactggttctcgaaccgggcactacgctagaataccgtcatccgttactttctccctccaaagagcatacaattagtgggttagttcataggttaggtagatggcaaagctacgaagcggaacctgccctttcatccggtgtgatttcgcttcaaagcagagccgaacccttaatcatcactaatctgcgttactataactggaaacaggcacctgccgaacaggaatatgataccactacggatatcgtccgcttaccggctgctgatcagcgaaagcgtggcctagtagtaagcatcaccgctgatgacttcgccgcaggcgacaccgtacattatctttccaatcatggaatagaaggatacttcgaagcccacaaagccccctccatcattaaggaagtggaaggaaaaaagagtttcagttttgatggtcatcaggtattccagtccaacttctccctgcctgcaaccttgctggacaatgccccctatacattggaagcctggatactgaatgattctattgccgaaaacgaatgtgtagccgacttcacgacttcgcatgacgaattggaaaagattatgctcgtcaatggcacggagccccgatgcggtgtcatcaaccactacggctggtacgaagatgccggatacaaggacatgaaagagctgactggcaaatggcagcatatctatatttgtttcgacggccgcatagaacaagtatatatcaatggtaaattaattagcgaaaaagatattcaattgctaataaaaccatcacaatacgtaactttggggcggaatgcagaacacaactggccgttcacgggctacctgcattcactgaaactatgggacgaatatattccaatcaagaaataataccataaaacgaataataaccatgagaaaagtattagttaccaccctgctggttgccgccaccgtaggcagtcaggcgcaagtgaaaaaccaatcgcacgggtatcccattgatcccgtacctttcacctcggtgaaagtaaccgactccttctggggacaacgcctcaacgcgagccgagaggtaaccatccccctggcattcagcaaatgcgaggaaaccggaagataccagaacttcgtcaacgcagcccaccccagtgataccattaaagtaggcggactggcttttgacgatacggacgtatacaaaaccatcgaaggtgccagctacctgttgcagacgtatcccgataagaaactggccaaatacattgacagcgtgctcgtcattgtagccgccgcacaggaaccggacggatacctttataccagccgaaccatgaatccgaaacatccccatgaatgggcgggaagcaaacgctgggaaaaggtagaagacctaagccacgagttctacaacctagggcacatggtggaaggcgccatcgcccactaccaggccaccggaaagaagaacttcctcaatatcgccatccgatatgccgactgcgtatgccgtgaaatcggtacaggcgaaggacagcaaatccgtgtccccggacatcagattgccgaaatggcacttgccaaactttatctggttaccggagaccagaaatacctcgaccaggccaagttcttcctcgaccagcgtggatataccagtcgtaccgatgaatacagccaggcacataagccggtggttcaacaggatgaagctgtgggacacgccgttcgcgccgcatatatgtatgcaggtatggccgacgtagccgccctgacgggagacaccgcctacattcatgccatcgaccgcatctgggacaatatcgttggcaagaaatattacatcaccggcggtatcggagctacagcagccggagaggctttcggcaagaactacgaattgcccaacatgtcagcctattgcgagacttgtgctgccatcggcaacgtgtacgtcaactaccgtcttttcctcctgcacggtgaatccaaatactacgatgtactggaacgcactttatacaatggtctgatttcaggcgtatccttagatggcggcggtttcttctatcccaacccgctggaaagtatgggacagcatcagcgccagccctggttcggttgtgcctgctgcccgtccaatatctgccgtttcatcccgtccctgccgggatatatctacgcagtgaaggataaggacgtttacgtcaacctcttcatgtccaacacttccgacctgaaagtaggtggcaaagctgtttctatcgagcaaaccaccaaatacccgtggaacggtgacatcaccatcggcatcaacaagaacagcgccggacccttcaacctgaaagtccgtattcccggatgggttcgggggcaggtagtccccagcgacctgtatacctatagcgacggcaagcgtctgaaatacacagtgaaagtaaacggagaagccgtacagaatgaactgaaagatggttatttctgtatcgaccgccgttggaaaaagggtgataaggtggaagtacacttcgacatggaaccgcgtaccgtgaaagccaacaataaggtggaagccgaccgcgggcgcattgccgtagaacgcggaccgattgtatactgtgcagaattcccggataacaacttcgacatcttcagcgtattcatgaaccgcaacccgaagtttgaagtggtggaaaagcccgatctactgtatggcatcaaccaattgaagaccggcgcacagacacttggctatgacgatcagggtcgcctgaccactaccgatgtgaacctgacactgataccttactacgcatgggcccaccgtggttcgggagctatggaagtatggttgccacaagagctgagcgcatcccgccccgccatgcctgccacactggcttcggaaagtaaaatagacgcatcccaccgcgcaagctccatctcagccatcaacgaccgcctggttccgaaagatgagaacgaccgttccctgccctactaccattggtggcccaaacagggaactacggaatggatcacgtatgagttcccggcagaagctaccgtatcaagctccaccgtatattggttcgacgatgctccctggggcggttgtcgtgtaccgaaaagctggaagatatattataaagatgcacaaggccagtggcaacccgtcacaggtgtcgacaaatatggcgttgtaaaaggtgcgggaaacaccgtaaactttgatcccgtgaaaaccaaatcagtaaaactggaaatcaccctgccggacaaaaatgcagcaggtgtttatgaatgggaagtacaataaaggttagttagatatgaatgtttgtaagttaggtttgtcgatagccatgctccttagcgggggcatggctttcgcacaaggcacagtggatgattataaccgtgcctacgcattgagagagaaattcagtgccaacaaagttttctactccaacgtcacaccgcagtggatagaaggcacacatcagttctggtatgtacgcaatacgcccgaaggccgtatctacgtatcggtgaacgcagacaagaaaaacagaaaggagttgttcgaccacaagcggctggcaagcgcactgagcaacgcatccggcaaagaagtaaagcccgaagcaatccaactggaacggctacgagtgaacccgagcttagatacgcttcgttttgtttttggtaatcagcgctggatgtacgccacccacaaaaatcagttggtaaatgaaggtgccctgcccgaccgcaatgcaccacaaaaacactggatggaacgggatgacgaaaaagaagccgctcccgtaacttcacccgatggaaagtataccgcctatatcaaaaatcagaatgtatatgtgaaggaacttgccacgggaaaagagaagcagttgagccttgacggtacactcagcaactattactcagtttatatccgctggtctccggacagcaaaaaagtggcatcctgcaaaatccgcccagtagagaaacgctatgtgtactatgtagagtcttctccggcagatcagctccaaccgaaactgcacaagcaggaatatgccaaaccgggagacgaacttcctttcaagataccttgcatttatgaagttgaaacaggacgaggcatcatccccagcaccgacctcttcgaccggcagtatgaaatatacggtcccgaatggaaccctgacagccgttccgttaccttcgagtacaaccagcgcggacatcaggcatatcgtgtacttgaactctctgccgagacaggcaccgtacgtcctctgatagaagaaaccagcgacaaatacgtgaattatacccgccgtttccgccacgacctaagggataacaagcacatcatctggatgagcgaacgggataactggaaccacctgtacatgtacgaccgctctaccgcacaacccgtccatcagataacccgcggcaaatggtatgtgcgcgaagtgctccgcgtagacgaggacaaccggcagatttatttctccgcaaatggtgtacaacccggtgaggatccttatctcatccgctattaccgcattggttttgacgggaaagacttggtttgccttactccggaagaaggaatgcaccgtgcctggttctcgggagatatgaattatctggtagacgtttactctatggtaaacaaagctcctgttaccgtattgcgcagtgccgaagatggcaaggtggtgatgccgctggagacagccgatatcagtcgtctggaagcagaaggctggaaagcaccggaagtatttaccgccaaggggcgtgacggtaaaacggatatgtggggactgattgttcgtcccactaacttcgacccgaaccggaagtatccggttatcgaatacatttaccaaggtcccggcgaccagtatgtacccaagactttcatcccgtacaactggtacatgacttcccttgccgaactcggttttatcgtcgtcatggtagacggaatgggaacttctttccgttcacgtgaatttgagaacgtatgctacaagaatctgaaagatgcaggacttcccgatcacatcgcctggattaaagctgccggagagaagtatccgtatatggatatggaccgcgtcggtatctacggctgttccgccggaggccaagaatccaccactgccgtgctgctacatcccgaattctacaaagccgcttattccgcctgtggctgccacgacaaccgcatggataaaatctggtggaacgaactctggctgggatatcccgtaggagatcaatataaggaaggatcgaatgtagagaatgcccatttgctgagccgtcccctgatgctggtggtaggcgaactggacgataatgtagatcctgcctcaaccatgcaggtggtgaacgcactgataaaagccaacaaagattttgaattggtagtgattcccggtgcacaccacacgatgggagaagatttcggggaacataaacgctatgatttctttgtacgccatttacaaggaggaactccaccggaatggaatgcaataacatatcgctaggatttatataatgtatacctcaaaagtagagccggatttaggtctgactctactttttattgtattaactatcaattaaataatttttcattcattacaggtaataagatttctgagtttttattcatatctttgtgtatcgatatataaaagatactatgataaaagccatctcaaatatgattatcagacaaaaagtctacctgatgcagctcttgtgtcttttaatattcagccccttgctgcatgctcaggatatcgtggtcagagaaataccttccttagataaacttccggtgaatgccatccatcgtatatttcaggacagcgatggctacatgtggtacggcactttcaacggtctctgccgaaacgacggatacaatatccgcgttttccgctccgatctgtatcacccgggactcttatcggataattatattacttatatctccgaagaccacgacaaaaaaatctggttcggaaccatgaaaggaggctatatactggataaagctacctgccggatcactcccatggatttgcaggagtgctccgacaagaatgtattcactataaacgtaacccgggacgggagtatatgggtaagcatgcatggcgtattattccggttcaaggctgacggcactctgataaagcggtataaaaccgaatacaaccactctcctgaatttgtgtacatcgtctacgaagacaagaacggggatttaataatctccctcacccgaggcggaatgtataaactcaataaagatacggacaactttgaagcctacttccaccacagggattatatggacattgaacggatcatctgggacgaaacaaacggatattactggctcggcacctggggaaaaggaatcgtacgcttcgacccgaacagtaaatctccggaaacgcaatatattccccagcctctccctgtagatatcacaggaaatgctacgggagctatctaccacatggtgcaggatgatgtattccactatatatgggtcacttcctggaaagacttgtttgctttccgcatcacaaaggagggacacttagaacaagtggacacttcctctttccttacccccggcaacaaaatactttatgaaatatataaggataaagacgggaagctatgggtatcggctttcgatgtagaaagctttattatcgatatccgcgattacattgtccagaagtatcccctgccggatttaagaaaccagttaaaggcgaatcccgccataaactcactgtgcaaagatgaagacggtatcttctggttttcgcaagaccgatacggcctatgcatttatgatagccggaaagaaaagctcaaacactattcacaatgtcaaggaacccggaatttaccatttggagatgtcaccaacatagccagatcatataaccacaactggatatgggctacttcgtatggccccaccgtcttcggcctaagccagcagaatatggaaatgaaagaagatgtacggatagaacttggcaacgtcacaaataatccgggactgattacctcactattcgaagaccctcaaaataatctatggataggtactacgacaggattgttcgtataccggattatgagtgcaactcttgaaagcattccggaattatcgggtccggttgccggcatcacccaaacagccgacagccggatatggactgtcatccgaaacaaaggcatctaccggattgggcaggataaaggtatcgaatcttatcccttcgataaagactttgtatgcatagatgccacgagtgacggaaacctctggatgggtactaccgaaggggaagtcttactgttcgacccgagacaaaaggagaaactgaaagactacagtttcagttgcggcatgaagggggatatcatcaataatatcactgtagacgtctacaatcatgtatggatcactaccaatcagatgattaaagagttcaacccgcgcaatggcgcttaccggagttacagcaccagggataagaatttcctccttacccgtctgctatccaaagccgtctactacgaccggaaaggagaaatctatttcggcggaatctcaggcattgtgtccatctcaccaacccagcaactggaaagcatacccgaacaggtaaccacccatatcagtgacatcaagatcatgggaaagagtatttgggacgaccagttgaagcaagaccctataaatacacctatccgcctgtcacccaatgatcagaatctggaaatcgaattctcttcattagattttcataacttagaccagatacgttatgcataccggatggtgggtatagacaacgactggatctacctaaatgaccggaagaattccgccttctacaacagattggacaagggaaaatatacattccaggtgaaagctaccgataaaaacgggttatggagtaatgaggtgacggagataacaatccaccgcctacctgcctggtacgaaacctggtgggcttatctcttttataccctgctagttatgggcatcataggatatagcatttatgcctatctgaaacggatgaaacgcaagaacgacgagaaatgggcggacagtgccgagttggtgaaaatgcatcaatatctggataccaaagacagcatttccacctctgaatttgccgagatagataagttacttctggatcgggcgaccaaagcggtagaagaacatctgaatgaaccggaattcaatgtggtatcactggcagaggctatgaatatgtcccgttccacactttctcggaagataaaagtaatcactggcaaaactccgttggattttataaaggatataaagatgcaacatgcctgccggatgttggaaaataaaacggcaactgtggcagatgttatcacagcattgggctacagtgattataagaatttcacccagtcgtttaaagaagcgttcggtatgtcgcccggtgaatatcagaaacagataaaagagaagaaagaagaaagtactcatccatcttaattaagcagcaaagcacccgattatttcaggtaattttgctcagatcatagggggtaattagtcaatttagagttgattaattaccccctatgatttgatttataagcattaacagctttactcttatttgttttcctttgctgccgaaagatggatgagctcacctctatcgaaagaaaaagaaacctttaattttaaattcaaattcatgaggaactatcattttaaaagatcatcaaagaaaactctcctctccgtgatgatggtatccgctctctatgcgggctacccacaggatgcttttgcaacggtaaatgaagtacaagcagtcatgcaatccaaccctgtaaagggacaggtagtagatgaaaacggagaccccgtcatcggagctaccgtaatgatgaaaggtacatccaaaggagctattacagaccttaacggtaacttcacgctggaaaatgcagctaaaggtacattggtaatttcttatataggttacattacagaagaagtgcagacaaacggacaagcatctgtaaaagtggtattaaaagaagatgccaagcggctggatgaagtagtggtaataggatatggcacacaacgcaaggaggaactgacaagctcggtgatgagtgtgaaagccagtgagtttgtacaagcaacaaaaccggatgtagcagggctaatcaggggtaaggttgcaggcttagctgtagtttcgcctgatgccaatccattgtccacttcacaagtttcgttgcgtggtgttgctacgctcaattcaggcacctttcctttggtcatcattgatggtgtccagggagatctcaacagcgtttctccgaatgatattgcacaaatcgatatattaaaagatggttcggccgcagctatttacggaactaggggtaccaacggtgtaatactgataaccaccaaaagtggaaaaacagaaatgaagccatcaatcgaagtcaatagctatatttcgtttcagaagataaataagaagctccctatgatgaatgctgcccaatatctggataaagtccaacaaggaatccccggtgcaatggataacggagccagagttgattggatggacgaaatattacagactccattcaatcagacatacagtattaaccttaagggtggatcagcaaacaccagctacatagccagcttcgattatacctcgaatgagggaattgtaaaacgctcaaaagtagatatgatttatcctcgtatcaacattgttcaccgtatgtttgacaacaagcttaaaatagaggcaaatttgaatggctatcaaaggaagtacgacatcggatacagtaatgatgtatatcagagtgcattgatttttaatccgacaagtcctataaaagatgaaaatggtaattggactgaaatagcacgtgatatgatttttaatccggttgcccttctgaacgaaacaaaaggagagaataaatcaacgaacttaagagcctattcaggcataacccttattcctgttgaggggctggatattaaattcctcatctcaaatgagacatacaacaacttttccggatattatgagactaagaagcataaatcaaccacaattagtaaaaagaacgggtatgcttcacgttcaacagcccgcaatgaaaataccatgatggagttaacagctcaatataataagcaattcaacaattcacacaatctgaatgcattagctggatatagttggaacaaatggaactatcaatccgcttctatggataattatgactttccatccgatgattattcatataataatatggggttaggcaatgcgctgaaagaaggaaaagcaaaccaatcgtcctatcaaggtgagaataagctcattgcattttttgcaagagtaaattacaattataaaggtaaatatttcatttctgccagcgtgagacatgaaggttcttctaaatttggtaaggaccacaaatggggtaattttccggcaatatccttagcctggaatatgaagggagagcaattcctcaataatatccaagcaattagtacccttaaactaagagccggttttggtataacaggaacggaacccggttcggcttatatctctttaaattcattaaatatgggaggttacggctactataacggacaatggactaatcttttacgaccaggagggaatccaaatcctgatttacgatgggagaaaaaagaagaattgaatattggccttgacttcggctttctcaatgacagaatatccggaagcattgatttctacaaccgggaaacaaaggatcttataggctcctatcaagtccctgtaccaccttattatagcgcatggattacagcaaatgccggttcaatgcgaaatacaggtcttgaggtatctttgaatgtagttcccgtacagaacaagaatctcatttgggattcaggtatcaacttttcaacgaacaaaaataaactcttatccttgtccagtgacaagtatttctcagactcctatcagaatgcaggaaacacacttgctcctattcagcaaccgactcatagaatgcaggaaggagaaccgattggaaatttctacggttacaaaagtattgatatagacgaagacggacactggatcatagaaggtgcagatggtaatcccaagcccatttcagagcaacaggattccgacaagaaagtcttaggtaacggtcttcctaaattttacctgaactggaataatacaatcagatataagcaagttgatctgtctgttactatgcggggagcattcggctttcagatattaaatatggcagaaatgcattacgcagctccggtttcattattgggaggagataacgttatggagaaagcctttgataatgtatatggtaaacgcccattggcttacgatcaatccctgcaatatgtaagttacttcgttcaggatggtgattattggaaaatagacaatgttaccataggatatactccaaagattggaaaaaataaatggataaaaagctttagaatctacggtagcatatcaaatcttgccacaataaccggttacagcggagttgacccagaagtaagcattaccggccagactcctggtatagatgacagatacagatatccttctgctcgcacattctctttaggagtaaacctgagtttctaatttattaaaatgaactattatgaaaaaaagagctttcactgaatatatatctttatttttattgacaatagggatcgcaagttgtaccgatctggacgaaaaagtattttcatctgttacagaagaaacatacaactatactgtcaatgatttcggtcctaatatcgcaggagcttatgcagcattgaattatggctatgtaagcacgtattggcaaacccaggaattaactggctgttgcatatcaacacctgctaattcaaccggttgggatgatggaggcatttataaacgtctgcaattccacaactggaactctgaactgggacagattttagacttgtggaataactattatacaggtgtaatcttgtgtaatagtgctattgataaaattgaacgaggattaatacctgccccatcggatgcagaaatacaatccggactggcagaattaagagccttaagagcctactattattggattctctttgataattttggtgatatcccattggtaacgaccatgtctcaggatcttccggagaaaacgccaagagcagaggtttacgatttcgttgtaagggaactaagtgaagtgataccttccctgaacgaagaacaagggggtaatatgtatggacgcattaataaatgggcaggaaaagctatattagccaatgtatatctgaatgcagaagtctatacgggtaccgcccgctggaatgaatgtctgtcacaatgcaacgatatcattaatagcggaaaatgcgatctgtcaccagagtataaagactccttcagggctcaaggtgtggaatcttcaaaggaggtgttgtttacaatcccttatgattacaataggggagtagtaggaaactaccttttcatgaattcatggcatagtgagctgcaaaagaaattccttttgaacgcagtacccaatgcagctggtgggccgaaaggtacaacacaattcattgacacctatcaggaaggtgattccaggcttgaagacacctggttgatgggccagcaatttgatgcagaaggaaatccattatacggtgtttatgacaagaaaggagaactattaatattctccaaagaacttcctgacggaaattatacaaacgaaatggaaggctacaggtataataaacaagaagttcctgccggttcagaatggagttgtagcacagatattccacttttacgttattcggaagtactattgatgaaagccgaatgcttgttaaggacaaatcagcccggagccggtgaattagtaactgaagtaagaaaacgagcttttaaaacaaacccatcaaaagcaatcgtaacagacgatgaattgaaagagaattccagttacaaatggggagtggttgaaaaatatcagatcacagatcccggcaaccaagatccaatagaactcggacgcctgtttgatgaaagatgttgggagttcgtatgggagggatatacccggagagacatgatacgctttggcatattctgtaagaaaagctggttgtcacataaaccgcagggcgatcatcgtattgtgttcccaataccccagagagctgtagatgccaatccgaaattaacacagaatcctgcctacgcaaattaaaagatttaattcattatatgacaaaagcaatgataaagagatgtaccgggacacttgtagccctgtgtatctactcaatatcaggattgaacgcccaaaatataacagtgaaaaacgattgttttcggactgatttttcagaagatggcgtgtctgtttttcaggttgacagagattctgtcaacctgatagcagacaatcagatgtggggagatattttgatacgatatcgtgtcaaccaagaagactggaatatgcttgaaacgggattgaccagacgtacttgtataaataaaaatacatatgtatatactgattcgttgtgctatatgcctttatgtatgaagcgatattacactctcgctgaagatggtctgcatttgaaaatcgaaatttcaaatattaccaaccgctctgtagaattaggtgatatagctttcccctttaagtggagagaaggattcaatgccgctccaagcacaatctttgagagcaactttacacataagcacaatatagctctgaattcttcatttcagatactttccaaaccatcaggtgtgggtcccttttatatcatgatgaccggtgagggcactccactggaatactttgatactactaataatgtatatacagcatatcttcattccggatgtactggtcccaaaactgaaggcagctggcgtattcctcatacaacaagagtattgacacctagagaaaaagtaaactatagttttttactcacttccgtttcccgatatgaggacatacgtaacgccatttatacaaatggattactggatgttcgtaccgcccccggatatactattcccagtgatttatctgtaagagttgccattcgtctcaaaggaacaattcaatctcttgtagcagaacatccgcaacaaacagaaattaaacagcttggaagaagtcccgatggcaggtacttgtatgacatacgttttcacaaacttggagagaatattatttgggtcaattataaccatggtgaaaagtctttcctggaattcttttctacggaacctctggatgttcttatcaaaaaaaggagctctttcattgtcaacaaacagcaacataaagctccgggcaaatggtgggatggcttgtattctgtatatgatatgaaatatgggaaactacgagggccggaagataccgacggatttaatggttggtgggaatacgtctggggatgtgatgatccgatattgagtaaggcaccttttgttgccgctaaaaatgtagtgtatcctgattctacggaaatagcttccttagaatactacctgaagaattttgtatggggaaaactccaacgaacagatcaagaaactccttatccattcgctatctacggggtacccaactggcatgtagcccgtgattcagccttacaaaagctatacaaatatgatgcaaaagatcggataaaagtctggagagcatatgattatccacatattttcaagctttattatcacatgtcacaaatagcggaaatgattcccgaatggacacattacctgactgccgatgagtatttcgaccgagctgtacagaccgctatggcttactttaagtatccgtatgaaatttggtcttggctggatatctataaatggggtatgtataacgaatgggtagttcttgaacttataaaaggattggaacaaagaggcaggaacgatgaagctgcatacttgagaggcgaatgggagaaaaaagccaagtattttatttatgacgataaatatccttatcgttcggaacatagttttgaccgcacagcttttgaatcatcgtatgccctggctaaatatgcgatagaacatccgatgaaaccggataaagacttatggtatgacaaaaataaaagaacgtggcattcacacccgaaggtgacaatagaagatgctgaaagatttatgaagcaacagcattatgcaagcttgtccgtacgcgggtggatagctcccaaatattacctgtccggcacagattgcgcattcaagcaacatacgggcgacatgtcttatatggccatgatgggaggttggtctgtactggactatggtctgctttactcgaagaaccctgattggatcgaattaggatataactctttccttagctcatggtcgttaatgaatacaggaaacgagacatccaactatggctattggtatccgggaaaagaaaaagacggagccaccggatggtgttttgtaggtgcaaagaatggatatacatggttgcatagaaatgaaaagcgtggcccttggcgttatgatggagagatagacctaggatatggcgcggcctttcatactgcccgcacaattgtaatacaggattcaatctttggtctccatgcctatggtggggtattgagcaaagaggaaacttccctgtctgttattccgcgtgacggggtaagacagcaattcagttttataacttctgaatttcgctatcatctcactttgtcaagagacggatttctaccagaagcaccaataaagattgaaagaaaggggaaacaatcgcattttatgctggaaaataaaattaatactgctatgggtactaagccatctaaatctgggcattcaacattattacaaatcagagcagacaaaattgttccttacaaagtacaagcgggtaagaaagtttgtacgatacaaaaatgtactgtcggatgggaagtgagattaccagtaagtgaaatcaccgaagaagttacaatatggtggaaataatgcatataaaccattaaaaacaattcattattaacatatcaaagtatgaaaacaaagattattgcaattttagtatttgccagtttgatgacgaagcttaatgctcagaatcacgataaagtaggattactggaaaagccggtacctgtttcttctgtaagaaatataaccggattcttcggacatcgtatggaagttaaccggaatgcctacctgaaacactttccaatagataaatatgtggactttgttgtaaacagacaacattcggcttgggactggacacaggcagaacagcatggaaagtggatagaatcagcttatctgtcggcagttcagggtgatgacaaggaattactaattaaagctgaaagcgtactgaatcgcatcattgactcacaggaagcaaacggttatgtaggagccacagccaagagtttccggtctcccgaaagaccagtcagaggaatggacgcttacgaattatattttgttttccatgcctttatcacagtatatgaagaaacaggagataaaaaagcactaactgccgcagagaaattggcagactatttcttgcaatatttcggaccgggtaaactggaattctggccctctgatctgagagcacctgaaaacaatcaaaaacatctggacggacactcagactttgcagggcatagtgtacactattcttgggaaggtactttactttgtgaccccataacaagactatatgaactgacaggaaagaagaagtatctggaatggagccaatgggtagtcagcaacatcgacaaatggagtggatgggatgcattctcccgtttggattccgttgcggacggtactttaggggtggataaacttcagccttatgtacattcgcatactttccacatgaactttatgggcttcttgcgactgtatcgtatcaccagtgataaaacgttgctgcgcaaagtgtccggagcatgggacgacattcatgaacgccagatgtacatcaccggtggtgtgagtgttgccgaacattatgaacacgactatgtgaaaccactttcaggtaatatcgtggaaacctgtgccacaatgtcatggatgcaactcacacaacagttgttggaattaaccggagaatccaaatatgcggatgccatggaacgcctgatgattaaccatgtatttgccgcccaggattgtgaaagcggagtttgtcgatatcatacggctccgaatggaagtaagcctgacggttatttccacgggccggattgctgcacagcaagcggacaccggattatctcgatgttacccaccttcatttacgcagaaaaaggaaaagagttttatatcaatcaatacatgccctcacaatataccggaaaggatttcgcatttgaaatcaccggaaactatccggaatccgaaaatatgcagctgaccattgtttcagagaaagcaaaaaacaaaacattaaacctacgtatcccctcctggtgtgaacatccggaaataaaggtgaacggtgaaaacatcgcagatgtaaagcccggtgcttacctgaaattatcacgcaagtggacaaaaggggataaagtaagtatcactttccctatggaagagaaatgggtatcacgtagtcatcatagcaaatatgtttcctataaactagcaggtggggaaatcatgtataaggaagaaccgactgatagaattccttatgcctttgtacgcggtccgattgtttactcactggacatggtatggaataagcagctttgcaacgatgatgtgaatatggatcaggatatacggatgaatacaacgatgaaacctacactgatcaataagcctgataacaatatgttagggccggtttatcaaacgaaagccttatataaaggtagtgagatagatgtgattctcactccgttcgcaaacataggccaatggttccgcccggatggaataaagccacagaaatacgctaacgctttcacgtatggaatctggctgtataacataggtacaaagtaaataagaataaattagcccctgcaaacaatcatgaaatgctcccatgatagttgtaggggcttattcgtttatgctttcagtcgcataatgaacttacttcctttccccaattcgctttccaccgtcagtgttcccccatgtgcctccacaaaatcttttgaaatggaaagtcccagtccactgccttgcacctttgtgccgggcacacggaaataacggtcgaaaatgctctgatgataacggggatcgatacctttgccgaaatcctgcacatacagttcaacaaactccttctcacgcttggcaccaataacgacacgcccgttttcttttgaataacggactgcattgctcagaaggttcgtcaatacccaagctatcttctcactatccacaaacagtttcggcattttttcctccggatactctacttctatctggataccgaacttatccgcctgaacctgattggctttaatggcatattctataagttcgataggcttggttatcttcggcatcatctggagcttgccggcttctacttgtgtcatattcagaagttcaccagtgatacccagcaggcggtcggcattttctttaatgcttttcgataattgttcctgctcatcattcaaagctcctaccctcttatcctccagcaactgcaaactcataagaatagctgagataggcgttttcagttcatgagagatggtggagataaaggttgttttggcagaatccaactctttaaattcggtgatatttttcagcaggatcacatcacccaagttctgcggttcatccgtatcggcatccgtatttataatggtgatgtaagaagcctgaaaatagctttccttattatccgcatagattttcaagggttctttcttctcacccggagtaatcagttcccgaaccagacgacgaaggagatcattctttaaggacagttcctcggcagagtggcggattacatcttcacgtttcagattcaatacggtgagtgcttctttattgataaagagtatttcatgctcacaattcagaccgataataggttcatgaatactgttcacaacggcttcaagaaacttctttgcagaaagaatatcgttcagcgtactggcacgatattcagtcaggcgctcagccatactgttgaagctatcggccacctgacggaattcctcgtgtccgctcatatccaaacgtttctcatagttatgattggcaatttcaaggataccacgcgtcaattcctgaataggcttgttgatggaacggggaagccagaccagcaacacgatactggcaagaatgcaaatagcacctgtaacggaaatccacagcaaagcacgttccagtccgggcatggcggcagggctgtctggttcggtagctgtcagtatctgaagattcactacggagagagcaaccagcagaatgatcataccggccagaatgcctacactgagtattaatttagtacgaatattcataatgcactgatgaattaaattttatgcaagtataatcaaatctacgtttgcctgagctaaatcattcacaaattttctgtatttcaacaccataaacaaagattgaggtaaacggaaagaaggactgcccatacaaacagaagtgatctgtctctctttacaagtacggatgatggcatccaatacatctttggattgtacctgaaccacttcaccatccaactcagtgaccaacttaaagtgattcaacagatagcgctgacttgccaggtcgatacggtcagcactctcgcggggtgtttgtacatatagggctataaaagaagtattgtaacgggttgccagacgtgccgccttacgaatgatgcgtcgaggcgtcttctccttactgctgatgcacgccagaaacttctcatgccggactcctacactggaaacgaccacttcattctccactttcttctccacacgcaacgctacttccttcaaagccaattcacgcaattgaaggatattctcggttttgaagaagttattcaacgccatgggtactttctccggtttatagattttaccggctttcaggcgggtgatgagttcttcggcagtgaggtcgatgttcaccacttcatccgcttcctgcaatacactgtcagggatacgctctttgacttcgatgccggagatgccctgaacttcttcgttgacgctttcaatgtgctggatgttgacagcggaaatcacattgataccttcgtccagcaaatccatcacgtcttgccagcgtttctcgtttcggctgccctctacgttggtatgcgccagttcgtctacaatgacaatatcgggatggatacggataataccctccaaatccatctcttccagttccttgcctttataaaatatccggcggcgggggacaacggggagcccttctaataatacttccgtcccggcacgtccgtgggtttcgatgtagccgatttgcacgtctacaccgttgtccagcaactcatgggcttcctggagcatccgatacgacttacctacaccggcaatcatgccgatgtaaatcttgaacttgccacgacgggatttcttaatcaggtcgaggaagtgctgtacactttcttctctgttcatactttcatttttaggcgcggattacacggattaaaggctgcgctattacgctgtattacagaacaagaatccgtgtaatccgcgtaatccgtgcctaatctttagttatcacggtttcaacgttataccaaataccaaatgagcatcctccaaacatggattccagatagcttgcgcaaagataggcaatgaaaacgaatctgttatcctgatagccgtggtagctttcaacgctacattggtaaaagcaaaaccggaatttccatatcctactgtataagttttataaggaacgaatcctacggttgcattcaaatctaccgacttcacactgaacggatagttcagctcgcaataggaagaataattttgcttaccttcctcattcttatcggcaccggcaaacatcagataccatgccatagacaaaggaagtttctcacaaggcaacgtataagccaaacctgcttcaaagaagtgagcagtttcatggctcttgaagttgaagtacttcccggctccctgacctgcccaccatagacttgctacggacagtgtgggtcctgattcacctaaagtataagcagccgtcagatctatctccttgcttgccagtccttctgaagatttattaccatcgaagtctgtcgagccccaggctgtcacagaaaaatcacctatgctgaatcctaaagtcggctggaaacttgctccggtctgataaacaccacgccagacgtaagagctgactaaatcaccctgcacagtaaattcctgagcctttgcacttgtagttcctaaaatacaagcaacagcaactgctgctgtcgcaaaaatattgtttcttaatcttttcataattcattcaatctttttaaaagtaaggttgtcttcttaaaaaagagaggcagcgttccattcaccctgttttagacatcaccatggcaaaatatgaatggaatctgtccgcctctctaccaacctaaagttatttcttatttgcttcttccagtgcgatattcagtttcagaacattcaccttctccgtaccgaaaaggccgagaagcggtttctgcactgcattatctacgagagcctttacttgtgcctcatccatgccacgcgcctgagctacgcgtttcacctgtacataagcactggcgggagtgatatccggatcaagccccgaagcactggcagttaccatttctgccggaacgtctttacggttcagataaggatgatgtacgaggaaagtatcgatacgggcttctacttccgaaagatattcttcgttggtagggcctttattgctaccggaagaactggtagcatcgtaaccgtcaccggcatgggaagggcgtccccagaagtagatgtcttttgtgaacatctgtcctacattagcggcaccgacaactttaccatccaaagtcgctacttccgcattacccttattgggacctgccacctgggcaaatatccacaggataaggatatagaatacagagaagaacacgcaaaatgcaagtgttattttaagggatttgaataatgttttcattactgtttttatttattgaaagaataaactgacaatcatatctattaatttaattccgataaagggtgcaatgacaccgcctaagccataaatcagcaagttgcggcgaagcaatgcactggcaccaatcggtttatactgtactcctttcagtgccaacggaatcaatataggaataatgatagcgttaaagattatagctgaaagaatggctgactcaggactatgcagccccatgatattcagcggtgctaactgagggatggctaccataaacaaagcgggaataatcgcaaagtatttagccacgtcatttgctatagagaacgtggtcaatgtaccgcgcgtcatcaacaactgtttaccgatttccacaatttcaatcagcttcgtaggatcattatccaagtccaccatattaccggcttcctttgcagcctgcgtaccgctattcatagcaacgcccacatttgcctgtgccaatgccggagcatcatttgtaccgtctcccatcattgccaccagtttaccggactgctgctctttcttgatatactccatcttatcttccggcttagcctcagctataaaatcatccacaccagccttttctgcgatatactttgctgtcagcggattatctccagtcaccatcaccgtcttcactcccatcttacgaaggcgttcgaaacgttcctgaatacctggtttgatgatgtcctgcaactcaataacgccggccacctgccggttgacacacactaccaacggtgtaccgccgttacttgaaattgcagcaatcacatcttccacctctttcgggaaactgtttccggcactctctgcaatcttacggatagcatcgaaagcacctttacgtatctgagtaccattttgcaaatccacgcctgaacactttgtttcagcagtgaacttaatcatccgggcacccgtagtattcaggtcacgcatacggcgacctgtttcccgtcccagttctataattgatttaccttccggcgtttcatcggagatggaagacagcaggcaagcctcaataaaatcacgttcgtccacaccgggagctgcatagaacttcgtagctttacggttaccgattgtaatagttcccgtcttatccagcagtaacgtatcaatatcaccagccgtttccactgccttacccgatttcgttatcacattggcacgaagcgcacggtccatacctgcaatgccgatagcggaaagtagaccaccgattgtcgttggtatcaggcaaacaaacagggagagaatagctgcaatcgagatgtacgttcccggataatctatattggtatagtccgccattggaatcagcgtgacacaaacaatcacgaataccagtgtgaaacctgccagcaggatagtcagcgctatttcattcggtgttttcttccgggtagcaccttccactaatgcaatcatcttatccaggaagctctcaccctgttgttgggttaccaatacctttatcttatcagaaagcaccttcgtaccaccggttacggaactcttatccccacccgcctcacggattaccggggcagactcgcctgtgatggcactttcatcaatggaagccagtccttctacaatctcaccgtcagccggaatcgtatcaccggcttcgcaaataaagtaatcacctttcttcaggcgtgcactactgatattgcagactttgccatcaatcaagatttttgcgggagtctcctcacgcgtcttgcgcaggctgtcggcctgagccttaccacgagcctcagcaatagcctcagcgaagttggcgaacaacagagtaacaaagagaacgacgaacaccaggaagttgtatccgaatgttccatattccgtagttcccagcgagaggatgcagactaccagcatcaccagcgtcacaagctccaccgtaaacataatcggattcttaatcatcacccgtggatccaacttcacgaatgattgcttcaagctttccattacttgctccttttgaaacaaagaagctgatttcttatctttcattttatgaaattactaattatgaattacaaactaaaatgttcagcaatcgtacccaacgcatgcaccgggaagaatgacagggcagccacaatgaagataaccgcaaaagtcatcactgcaaatgtcaccgtatccgtcttcagtgtaccggcactttccggaataaacttcttctgcgccagcaaaccggcaatagctacctgccctacaatcgggataaaacggctcagaataagtacccaaccacacgaataattccagaaataagtattatctcccagtccctcgaagccggaaccgttattagccgcacacgaagtaaactcatacaattgctcactcagcccgtggaaacccggattattcagccatccgccctcactcgccacgaaatcgggatgatgggcaaacagatacgtagacagagccgttcctaccaggatcacaaacggatgaagcaacgccacaacggtcgcaattttcatttcgcgtgcctccaccttctttccaaggaattccggtgtacgtcctaccatcagtccgctaataaacacagctataattatgaacgtatagtagttcatccaacctaccccgacaccaccgaaccaggtattaatctgcatattcagcatctccatcataccactgagcggcatcgtagagtcgtgcataccattcaccgaaccattggaagtgacggtggtcgtaatgctccacaaggctgttgcagcagaaccaagccgtacctcttttccctccatcgctccgccatcctgcgcaatacccagttcgtcaatacgcgggttaccgttcatctcctgatagacattgatgccgacacccgccagataggcaaaaagcattacaccgaatatactataagctagtttcttacgattggaatagaaaccgagtgcgaaaaccattgccatcggtatgatcaggatagaccaacattccaccatattggacagatacgtaggattctccaacggatgcgaagagtttacaccgaaataaccgccaccattggtacccaattgtttaataggcacaatggctgccgcaggtccctgcgaaaccagttgttcctgcccttccagcgtggtcacctccatcttgccatcgaatcccattggagtgccctgaagaatcaggataaagcccacaatcagggaaagaggcaacaggatacgtgtactgctcaatacaaggaagttccagaagttacctattgtcttcgttgtctttacactgatggacttcatgacacctgccatagccgccatacccgttgccgccgtaataaactggaacagcatgatgacgaacaattgcgtaaagtaagtcaatccgctttcaccggaataatgctgtaagttacagttcaccataaaactgatgcaggtgttaaatgcctgatccggactctgcggtccgttaccgtcggggttcagaggcaaccagtgttgagtaaccagcagtaccataccccacacaaaccagaaagcattcagtatcaacaatgccttcaagaactgtttccagttcatctcctcctgtggattgatgccggaaactttgaatatcaatctctcgaccggcttcatgaagtccgaccatgttttttgtcctttatagacttttgcaatatactttcccaacggataagccaatgccaccatcaggatgacttgcaacgctacgcctaaaatttctgtgttcattttctttctactttaaaacttctccggtctcacaagtacataaatcaaatacccgaaaaccgcaatacccaatacaaataatgctgtatacataattctctctccttcttaaatcttttcaaaccagtccacacatttccaaaacagccagaaagcgaacaagccactcagcaggcagaaaataaatgaaatcgttagtcccatgttttttacctttattgaattaatactatttattttatcggaaggttatgtgccaatagcgtgccagaaggatggacaaactcataaacatctaataaacagccttatgcaacaagcgaatcaagatactcccttaaagagcaccctttcaaaatgaaaaggtattatctattttgaaaagaattgagggaaagaataaggaaaagaaacaatactattgggcgatttctgtttgattccggattacccaatacccccgttgcatacgtcgaacttttctatcggactttgtgcaacttaatcaaaatgtcaaaatgtaaatcgtgatatctgagatttctttctttcgcaccaatacttgttgtgctgcaaaaaaacgcaagtatttcctgttagaaaaatccaatatgacttaaaaccgagaaagaaagtatattttagaaaccgatttcgtcatatttagttcttattaattgcatatataatatattcccacaaaatcgattattagattccgttgcttatcttctttgaaatagagaaatatcgaccgctttttgacaaggctacaccctttttggaagatggtgtaaccttttagtgatgatggtgtagcctcatgaagcaaaaggtgtagcccttttgcgaatcacatcatccatttgagtgaaattgatgatctgtttgattaaaacagatgatatatatgggctgaatagatcatctgtgggctgccaatagatgatataatccttataaactaatgttatattcttccagaagcagctttccagcgggagcgcttattattaataacgatgaaagttcaacatatagcagcaaaacttcctattttggtatcttattgtcatatcagatctgattgtgaatacaagctatatcctatattcctcaatcttcctgtacagtgtagtcaaaccaattttcagcaaacgggcggcttccgtcttattccccttcgtgtactccaacacacgcgcaatgtgacgacgttccatagccgaaagttcgaagctgccaggtgtctcttcatccgactgttcgtagtgggcattctggatgtcaagtggcagatcggcaatagtcagctgttcgccttcgcaaacaataagactgcgttctatcacattacggagttcgcggatatttcctttccacggttgtaactccaaagtagcgaggaagtcaggggttatttcagttaccgggcgggaaagttgtgcggaaaagttcttcacgaaagcctttgccaacagacagatatctcctgcgcgctcacgcaatggcggcagatgcacctggaatacagaaagacgataaaacaggtcttcccggaaacgtcctttggctatttcttccggcaaattacgattcgttgcggctatgatacgcacattgacgcgtgtcggcttggtgtctcctatctttatatactctcctgtttcgagtatccgcaatagtttggcttgcaattcaaaggccatttcacctatttcatccaggaagatcgttccattgttcgcctcctcaaaaagtcctttcttatctttcaacgcccctgtaaaggaacctgctttgtgaccaaacatctcactttccaacaactccttgctaaacgaagaacagtttacagccacaaaattctgccgtgcacgcttgctgctataatggatggcctgcgcaaacacttccttgcctgttcccgtttctccggtcagcaatacaggtacatcagtcaccgacactttttgcgccagtaaaacagcatctttcaaagatttggactctcccaagatagaatcaaaagagtacgcctgccctaccttcttctcaagcttttcaagacgggcattcattgcggctttctctaccgcacgactgataaggggaataatcttgttattgtcatctcctttggtgatataatcgaaagctccgttcttgatggcttgtacgccatcgggaatattgccatgagccgtcaggagaatgacttccacattgggtgcagctttcttgatagccaacaccagatctaccccatttccatcgggcagaaaaacatcacacaaagcgacatcgggactttgcagttccaactgtttcagggcagccctgcaatcaccagcctgacatacttcatatccctccaactccatcatccgtgccagcagggtacggatttgcacctcgtcatcaacgattaaaatcttgctcatatttttcggataagttttaaactgataaatgctaaaaacagggtgtgcaaatataaagcttttccctaatacgaacggcacatcttttgaacttttatagtagaaagcttgaaaactccgaaactgattttagagcttaactccattcgtacaaggagataagagcagaaaagagcaaacaggcagcggggagtttcccttccattttgataaaatcattctgaaatggcaaggggcttcacaaaaagatttgattaataactaaaaaaagaagaatatgagaatctacaaattcgatggaaatgcaaccgcatccgtaagaggtatgcaacatgtggcaaaactgattcaagacaatacgtctaaaatagtcgtactatccgctcccaaagatgttaccaaacatttgggcgaggtagctgccagcttcttcaaccgaaacatagaggaagcacacgacaaaataacccgactggaattccagttcattgactttgccaacgaactacttacgaacgacactatcaagcacgaagccatccggggcattctcgactgtttccaggcaatatggaaatacagtatggaacctttctactctaccgatgaaaaggaaattctggcacaaggagagttactgacatccaccttgctgggattctacttacaggagcagggaatggacaacagcgtgatttgtgctttcgacttcatacgcaccagtatgaacggggaagcggatgaggaatatatcagccaaaaggtgaaagagatatgtaaaacataccccaatacacatctgtttctcacacagggaagcatttgcaggaatgcctttggtgagaccgattacctaaaacaaggtggaagtgactacaccgctgccctaatagggacagctatacaggcagaggaaatacggatatggacagatgtcgatatacacagcaatgatacactggtagtgaaagatgccgacaccataaaaaacctgagtttcagtgaagctgaacggctcatctactttaatccccaaatcctgcacccgctttgtctggctacagcatggaaagagaatattcccatccgtctgctcaacccgatgaatccgacatcagaagggacttatatatccgccaacagattgaacgaaaacatggtaaaggcagtcgccaccaaagattctatcacatacatccggttcgaatcgaaccatacactccggccttatatgttcatcagcaagattttcgatatcttcgccaaatataagacgatgccctgtctgctgacttcatccaacgataacatatccgtagccacagatgacaggaactttctttctctcatcctgcgggaactgaacaagtatgcccggatatgggtggaagataagatgagtatcatttctgtggtaggaaacatgaaatcatcgtgcatcgaaaccgaagcacggattatggatgcattgaggaatattccgctgaagatgatttcttacggaagtgatgagaatgatgtgtcgctggtggtcaaagtaacggacaaggcggaagcactccggttgcttgacgaaaagttgcttaagaaggcgtcttgaaaagattctctatatcacctgttggcggaattaattcataatggtatagtaatgaactaaatgctgataatgatttaggcgcggattacgcggattacacggattaatggctgcgctatcacactatattacaggaaaagaatccgtgtaatccgtgtaatccgcgtaatccgcgcctaaaattatattcataaccctacagaaagaaatcgacccgcacctaaaagaaattattccgtatttctttcgcaatataacgccccatcaactcctgcccttctttatcgggatgtaagccatcgcgcagatagcgtcccctgcccgaaggctgttcgaatttctcggttataccactattggagtaacaatctatcagttgtacggaaagagcacggcagatttcacgcagaatggcaatcttctccagattacgttcattgcgggttacatcaccggtctgaataggggtacaaacaaaaacacgacatttgggataatgttccagaatggtctgtatagcccaacgggcaccacctgccatagtggtaacgtccacttcagcaagagtcttacctttcaaggactcttcggcagaaccaaggttcttgtcatttgtccccatagagaagacaaagacatcgggaacgggatattgcccgttttccacttcggcaatgaatttctggatgtgaactttagaaacattattatgccgcatctgcaattcatggctgtcttctgtgggacgccaaccaccggatatccctgcaaaacctgcacttccataatcctgtgtatcggaatgacaggcccaggttgcagaacctaccgctacattatgatgggtggaaaatccaagcagctcgaccaccgtcttcgaccattgttcacccgccgtgatgctatttccatcacaaccgaaattcattttactgaaatcaggataaagggactgcgcttgtaacgcaatccctatccacaacacaacacaaaatccaatcgttcttctcattctaacctctaaaccattttatgaaaaacgttccattatctccatacacatacgtccgttatgatacgggcatttccaaaatccagccttgtcatcttcaatattcaccgtgccgtcagcacgcacactccaatgccactcaccattcccgtaatccaccaaatgcttcttgatgaagtcccagcaacggaatgctttctgcaatgctacttcatcttcaaaatattggtaaagattgacatgtcccaccacattttctgcctgtacccaccaatgacggtcggtatcggtcttctgcttacccagaaaagtttcataaatcatggcaccgtcaggtgtcagtccttcatcagctgcagcggcaataaactcaactaaaggttctaccttttccagtaaagttttatcatccagaatcaaagcggcttcatgtatcagccaggaagcttctatatcatgtccgtaagaaacaatgcgatacttactccgccaattgtcatcgaaaaacaattccagatgtcctgtcttaggattaagaatcttatccgtgaataattctatcaaattgcgaagttgcctcttgaggcgatcatctttccacacacggtacaaattagtatagggctccaagatatgcaaatgggtgttcattgtcttacgttcgttctcgtctttatcgctaagacgcatatcggcaatctctccccattcccgggtaagagcctcgcaatagccattcttcacagaatcaaagctatacttctcgatatcctcaaacagacgaacggcatattccaaagcctcggtatcacccgtggcacgatgatattcgctcagaccatagatggcaaagccgatagcatagatttgtttctttgtatccaatgggtgacctttataatcgagcgaccagtaaatgccgccgaactccctgtcatagaaatgatctatcacatagcgtttggcacgcattgccgcagacaggtattcttctttcttcagcaaacggtaggctgccgagaaagtccagagaatacgggcattcaatacagcacctttttctgtttccggcatcaagattccggttcccgagatacggccataaaagccaccgttcaccttgtctgtcatcttgttcagccaaaaaggaagaatgttgcttactaactcttcttccatctcttttcgcagattcgtgatgttcataagattttgtttttagtttaacttctggcgggattcatttctgtagggttatgaattaatttaccacagattacacagattgacacagattctattttactgattattagattgataaatctgtgtgaatctgtgtaatctgtggtgagtcttattcattcctttcccggtatgaatgaatttcgccaatgagttttttagttagcttatactccaagtattttgcagaccgacacataggtatttggtggaccaccacatacgtatttggcagatcgctgcatacgtatttggcggatcggtaaatacgtatcgtataatcctcagtctgatgctcgcactttcttcagtcctttgttaatttcctccacacgcttctttgtcaacggatagaagtacacgactatcattgccaccacagccacagcggcaggtatccagctcattagcaggttcagtcccgtcaatgcttccgctgtctgcacggcaccttccgccgtattgtagccgaatgacgccagtatccacatcacagccgcaccgccaaacgcaccgccaaacttctgtgccatagatgaagatgagaatataagtcctgtcgaagccgttccgtccttcagttcggcatagtccgaaacatcggcatacatactccatatcaatggtgaaacgatacccgtacaaatagatataatgatttgcattatcagcatcaaccagaaaccaaacggtgtgcaaggcaggtaaaagaacaggatactcaataccgccaatgccgccatcgtgaaaatataggtagacttcttacccaacccacgcgaaaggggaacagccagtactacccctatcatattagaaacttcacccactccgaggaataaccccgcatagaacaaaatcgtgaagtcacccaagtttaaaaaaatactgtcacctatataatctttaaagaaataagcagccgtagcaccacgcaccgtattaaacaagttagaacacaatgccgcacctatcagcaaccaccagggaacattggacaacaacgacttgaagtccttcccgatagaaactgtagaaacactctttacatattccctcgtcatactgaagcaaagcaagaacacaacaaagcacaatgcagcaatcacaatcatggaatattgccaactgacggtcactgaaccagtcatctccctgaaccatgtacaaagcggttcccaagcaaacaaggctataaaactaccaccataggcaaagaacatccggtaagaagagaacacggttttcgtatccgaatcgtccgtcatcactcccagcatagccccataaggaacattgatagctgtataaaccgtcatcatcagaatgtaagtaacgtaggcccagacgagtttccccgtaggtccaaaatcgggcgtggtaaacatcaatataccgcaaacagcaaacggaagagaaatccacagcagataaggacggtattttccccatcgcgtatgtgttcggtcggcaatgattcccatcatcggatcggataccgcatcccaaatgcgcgttactaacagtaggacacctgtgtccgccaggctcagcccgtatatattagaatagaatataggcagataataggagaatatcttccagaacatagaggaagacatatcaccaaagccataaccaattttctctttaagtgttgccataggtatgaaatatgaggtatgaggtattaagtatcaggtattaaaaaagagcataaaagtacaaaaatagcgcttcatacctaatatttaatgtttaatttcaggttcttgtcgataagcttcttcaaagtctctacggaagcggaagaagacaaaccatcgaccggagtattcatgcaataatctaccaatttatctacagtagaggtagctacatgcatccgcgtatccgaagacgcatagtagatgaataccttaccatcttcatcggcaatccagccattggtaaagagtacattgctcacatcaccaatccgttcttctccttcgggagccatgaaatagccaccgggagtagcaatcagtttcgtaggatcatccagagccgtcatatacatatagagcacataacgcagtccggcagcacaggcccgtactccatgcgccaggtgaagccaaccttttggagtctttatgggatgaggcccttcaccgttcttcacctctttaatagtatggtaataacggtagtctatgatcttctcttcttttacctcggcatgagtcatatcatctaccaatgcccagccgatgcctccaccacttccggcatcaataaacccatcttgcggacgggtatagagcgcgtatttaccatctacaaattcaggatgaaggactacgttgcgttgctggctcttagttttcagatccggcaaacgttcccatgtcttcaaatccttggtacgggcgatacctgccgtagccgtagccgaagatagatctcccacgggtgcattatcatcatggcgttcggcacagaatataccgtatatccaaccatcttcgtgtgctgtaagacgcatatcatatatattagtagccggaatcacatcctcgggcatagtgaccggataatcccaaaaacggaagttatccacaccgttggggctctctgccacggcaaagaatgatttacggtcagccccctccatgcgcagcaccatcaggtatttgccattccacttgatggcaccggagttgagtgcggcattcatgccgatacgctccatcagataagggttggtctgttcattcaggtcatagcgccagaataccggtgtgtgcgctgccgtcactacaggatatttatagcgcgtaaatatgccgtttccttcctctatcggctcgttcgttcttgttatcagtgcctcatgcttctgaaagagtcttgttaccttctcattaaaagtttccatattgattgttttttcttatttatacaaagagtttatgtctgccgcaaaaagtgtcttaggattattatagaatgtcatgaaatcctctgctgaggtctgtccgggatagggagcataaaagtgagtgatacgctcacgggcattacgccacaccagaacgtaagctatcggataatttccaatgcccggcaacagggtctccgtccaccacttcggatcagggatgccttcatatccggtttcggtaatggcaattactttattgtgcgctttaccgatgctgtccacaatggcaagtgatttttcaagattggcgaggtacgtatcacgctcgaattgataagtgtcgaagccaatcagatcaataagttcatcaccgggataacgtttcagatattgtgcagtatcctgaggttctgaaccaggcgagtaagcataaagtgcattatccacaccatcgttacgaaggatatccaccgtcatatgccaaagcgccttgtattcttcgggagtacaaagtttttcgccccaccagaaccaactgcctgtatgttcgtgccacggacggaatagtaccggaacctttaccccctcttctgtttgtagagaattgataaaagctgatactttacttacccaaccggtaaacttctcatgattggctccaccgggtaagatagatttcaccaccgtcgtatccgatacatcccaggagtctccccccgtcagcggattgcgcagatgccagcttaaagatgacattccgcccctcttatactgattcaatatctcctttcttattttagtaaacggaactttatccagactcatagtatcacccagttctatatgtcccaagtcgaaacttataactgcgggataatctccacaaacgctcttcacatcagaacgtccttcgtcgccttcccaaccaataccgtagttggtatcatcatgatgcccgaacataaagccccgggatgatacttttttaagattggcaagcaggtgctcagtttcgggagtacgcacaaatatccctcctttcgtaaattcttgttttttaggagcagatccgcaccccatcaatatactgactattaaaaatgcaagtccaactcttatatttttcatatttatacctctcatttattgtattacatcaagcgtcatcatttatacaaatgcaaaaatagcgaattaaagaatagtataatgatacttttttatccctttgctatatcatatttatatcggtaaaccttacctcattttatcacttcatagaaggaagtttttcacgactgattacataatcctgattcatggcatctgaccaccaagcctgatctgcatgttgatgaccaatcagtgtagtagcatcatactgataccaaggcataaagaacgcccaatgcgctccagcgctccattgttcggaaaactttgcaacaccaccacattcactcaatgcaatcatcttctgcgaataagaatcaaaaatcaagttaaactgtgcagcattgtctactccagcagtctgattgtagatatcacgtcctatgatatccacatactcatctcccggatagaagtctacatctttcgtctgagtggtccacacccagatcaagttgttgatacccttttctttaaagaagttgaacatataacgccataatttcttatatgtgtccgcaccatcagatccccaccaaaaccaagccgtaccaccattatactcataaatgttaccggcagcctcatgaagcggacgccaaattaccggaatacctttatcctgaagtaactttaaatatcctgccattttctccaaatcagctttggctacattactctcccaagtgccttctgtaaagatattcttgggatggaaagtggtcgtccaattaccatcgttattctgggttccattccctggagtacaagtatatttattcaaatcagtatctttttctgtagccggaacattccaatgccaactcgcccccaccaatccatttgcattccaccaatcctctacaaccttagtgtctgaataattaatccagttagcaggcgaccatgccaaatgaatataatcgaaaaaagcgatagctggatatttacctgtagcttttttcactagttctgcctcagcaacgttccaactaacattggccatagacgcagacaatgttttactaccataaacactgatcaaataatcgtatactttctttgcctgtaacagaggagtagaagtacaaagttcagtatccacaggtttaactcccggcttcttcaccgtcgagaaagaaatagtcaactgcggtgctctcaccccagtaggtcctaaaaccaccccttcaggaataaccaaattatagtttgtccctttttctaatcccgacaagcaaattgtcacatttttgagattagcagataccttatccaccgttgctcccgcaaccacaacctgactatgcccggaagaaggcgcgattacgttttggtcataagtcaacactacattcaagtctgcatcagaaacatcaacagcaccgttggcaggaatactggataccaattgaggagcatccagttgcagttcttcttgtgagaaaccattatcactaccacacgcatagaaaagaggcagcaaaaagataacactgagcaactttctaatgcatttatataatgctacagattcaattttcatatctttcattctatttgggttattcatttacttacactgcaaaaacagtgtaaacaaactcccttcattttacctgaaaatcaaaatgaagggagtccaatcaaactgttatctctattcttatttattgaatagcaacttttttaataatcaaatttgcaccttgcataatgagtccctgaccgccatcctgcaaagtagccacgtctcgcgcaccaagcacatattccaaactagtattaccagcagcaatatctacggcgtctgcgccacctgcaaaatccttaaaatcaggcaaagtgttccaaccatttccctgcccaagcttcaattgccaaaaatcagcggctgtatcctgttcaaagtaaacaagcagcttttgcccaacactgactgtcgtccaatcataaccactccatgcaagatcttgaaaaccgttggcccagtttcctaaatcgaccgaacccgtccaaagaactgtctcaagaatggaaagagctacctgctttaagataaaaccatctcccgtaacaaccagaccattcttcgtttgcaaagcttccaagtcttcggctgtcggtttaaataccactctctgaacttcagcacctggagtcaagtctatctgacctatagaaggtaaattaccccaaccgtcagctacacgagggctaatgcaagcccaaccagccgtaggatctgcaaattcaacataaaagataatctcttgccccacttttacagttgaccaatcaaaattaccccatgcaaggtcttgattacctgcccaacccgtacagatccaaggaccagtccaaataacaatttccgcgccatcatgatgcatagctactttatctgtttcaatactataattttcgtgctgcaccagaacgactttgccatcacccatatcttcaggcactgtaaattggatctgggtagcactttgaacaaactcaccttgcttcaacacgatgccaccaggcaaattaatcgatgttatgcgatctaagttctttccagcaattactacagcgtctccttctttcaaatcttcagtaggagaaatgctaacatactcagccatcggcaatgtgtacgcaacagtttcggctatcaaaccagaatattgaactaaagaaatagtaccggaaatagtagtttcaggtacagttgtcatcaactgagtgccatcagcatttaccgtgaaagcaacaccttcagtcatcagcgggaagttaactttttctaccagattaagatctgtaccagaaatagtaattgtttcaccaaattccaatgcttcagccgagagtccagttactaccgtttgtctgatttcaagcggttcaggccatgaaactatctgaggtttatccgcaccattgctgaatgtaatctcaccgctctgcgcttcgcgcggtacctctacttgaatctccttacgagtattcttcagaaaattttccgcttctaccaccacgtagtcgctgaaagtgaccgaagcaatgttccaaacaaattctccggaaatagtaattacatctccagcacacacgtttttgattggagcaacattctctattacagccgtttcctcgaatgtaatcttcgacacagatacaatagtatcattaccgaccaccaatcgaagttttccgggaactgtctggtcgggcactaccacctctatctcttcattattaattagatgaaattcggcttcttcataggtggtagattctgtcaacaaggtattcccttgcggaaaaagaaccttgtccactctattcagttgagtgccggtgatacgcatattatccaaacgtttcagtgggcatgggccaaagcccagcaaattcacaccacccctattgtatggattagtatccaaatcatcattatcacaccccgtcagcatagaaccacccacaagcagcaaacccgccattaaaagcaccgataatttatgatatagtttcatattagtcatttatttttatgattcttacttaatttaattgggcaccgcacgaatattgtcaatctttataagaggagtacaatcggtaccgctaatgccgccgcccacaacaaagagtacaagactagcaaaatcggttttcttaagcgcaccggtagctattccgccttcaaacgcatagacaaactcagtagcaataggcagagtcacagtaatccacttgccgttggtatgataaggtcctgaagcagtccaaggacgatacaatgcacgcggcaattcactgttttggaagtaagtattgttgggaccgggtacggcattaccgtaaatatcagtgccggcatttcccagcgtcaccttatcggtaccagcaaagataacttgcaatgcaccggcaccccaagcatattcagcaggtatacacatctcaaacttgatggccatattcttgaaatcattgaagtctacaaaatcgaacaaacggatgccgtctgccggataatcagtaggtgtactccagtcaccaggccaatactcgaatgcaaacttgccgtcattccatggaccttcggcagccatcaatgttgcaccatcacccagcatgatgtagttgccggaaggagcatctgcatctgtttcaatagggacattatgccatccatggttaccgagtccggttatgccatcaaagtcaaacataagcccgcgcgactcccgatagtgaaacacagatttcgttgcaccgtaaacggtttctactgtcacagcgctttctgctgcaccttcgggcactactacatcaatggcagtttttgtaaagtgttcaataacagccggtatttcaccgaacttaacgctgagcggcacattgggatcgtcaataaaataatctccgttaatagttacgacacttcccacaggagcgtactcaaacgacatggtcctcaccataggggcaggaacgcttacatgaaagtcataagttaccgtatcgttgttgcaactcaccatatatatcttgtcagacaccactccaggtatggtattagggatatccacgagcagcgtgttgccagtgatataactggtgttaagcgtagcttcctggtcattgaagtaaaggcgacgtatgctggtaaggttattacctaccatacaaatcgtgtttcccatatatccgctcacaatcagagagtctgaagacgcggtataaggtaaacgaatataacttacctcaggaagtccgcctgtattttcgaatgcatctggctgatcttcacaggctgtgaatgccaacgttgtaacagtcaagcatatcatccatttaaaatatctcttgattttcatatttttttccttttaatatagttgccattaacacaattaatatgagaaagtggcacgaacatccacatgttgtgcatcttccataagatgagggttgaagactacatcatccgaggggagcggtagcgtaaatactgaagccgttacgttcggtttagctgtatctgtttcataaagcatttcctcaggattcaccacccattgggtaggatcctcataataggctttataaagacctcctaaaccataataaccgttacgacgctgattctgcaaagtctgtatagccttatccatattgtaatatgacatacgcacgaagtcgaaccaatagtcaccctcgaaagccaattctagacgacgctctttcaatacatcatcaagcgtaatggacaccggacgttcataagaacttatagcacgatgacgaacggtataaaaagcgtcaatagcacttgcatcggtagtggaggcagcattgcctatcacggcttccgcatacactagatagacgtcagccaaacggagaacatgcgtactaagactgcttgtctgctgttcggcggcaataccgaatgtcttcttatgatcttcgttgttgccataaaggtgtttcgcaatgttggcaccggttgcagaactgagtcctacgttggaaccgggagcatagctcttgtcataaaggaattgcaaatagtcgaatcctcccttgtcctgccaccagtaactgtatttatcacccggcatcatcatggttgccttgcggcgtgcgtctgggttgatacgctgggtaggattaccgagcggagaaacttcaaaagcatcttgaaggtcggtagacggagccgtccagtcaccccagctcgaataaatgtcgaagccgctcattgcaagttccgaggtcaaacagttaccacaagtataaaccatctgttccgcactccatctccagccaaaaagactttcaacacagttgttgttctctcctttgaaaatgtcttcatagttcgtcatcagttgttttcccgaattgtctatcacatctttggcataacgtgcagcactacccaaatcatcaacattacgttgaccgttgccaccggcttcaacgcccgatttcgtgagataaaccttagcaagcagccctttggctccccacttatctatcctgccgggatcattgcgttctggcaacaattcaatagctttctcaagtgtcattacgatatattcgtataaatcattcttctgcaccttatacttatcattataacttccatcgcctatttcactactgttgtcatgaacaatgggaacttcgccaaagatacgcaccagatagaaataagccatagccttccacgcaaggcactctcccatacaagcactcttcacagtctccgaagcattggccgacttcaaccgattgtagataacgtttgcctgcgcattaactgcccaaagtgactctgacgtgctttttatatccggatcacttccgttaacgttaagtgacaagtagggactacctcccatataaatgttgcccgccatcacttcaggaatcttgtagaatccacggcttaggaaatcataccaaggaacattataaagggagagtacacccgctttacactgttcatcattctgataataattagagtcattgtaactgtcttctgccgggcgatccaaaaaatcctcacacgaagtgatagacagtccaagcaacatcgctactgctatatatttaatagttgatagtttcataataatatatctattaattgagttagaaagttaagcttagtccgaatgaataggtagtaggcgatgggtaacgtccaaagtccataccgtaaacattgacattctgggtatttacaccaatttcagggtcatatccatcataaccggttatggtcagcaaattctggatattcatgtaaacacgaagattctctacaccaattgttttaatccatttcttggggaatgtatatcccaaagcaatattttttagacggatatatgaaccatcttcgatataacgatcactgatacgatcattatcattcgggtctccaataacagcacgtggaagtgaggctgaaggattggctactctcacgttctcaatatgatcataccactgggtgccatcagtatacaccacagttgcatcaacaggttcaagacgcgcacgattcacgacatcagcaagctggttactccaagcaccgctcatagaggtcatcttcatcttcaagtagttataaaccttatttccataagaaccattaataaagattgaaagatcaaagcctttgtagcggaaagtatttgtccaaccaaatgtaaagtcgggcatcggagaaccgatattggtcttgtcatactcattgataacgccatcgggtttaccgtcgggaccacttaggtctttatacttcacatcacctacccatactgtctgcgaacgattaaacacgccgtctgccggatatttttccggtttcggggagttctggatgtcttccagattctgatagatgccatcagtaacgtacccgtagaagttgtaaagactttcaccaatagtagtcatacttaccacatcgttccactggccataacctacgatagctgcgttggctgtattgttcagtgccaaaagtttattcttgttccaggatatttggaaattactatcccattcaaacgttccaactatggggtgagtattgacagcaatctcgaaaccagtgttacgtatatgtccgtaattcccccagggagccgacaatctggaactggcatttccacccgttcccatataagagggtagttgcatttccatcaacatattcttcgattccttctgataccaatctgcagtaatgttgacacggtcgttaaagaatccaaggtcaagcccaatgttccattgttcctgactttcccattgaatatcaagattaggaatgtttgacggacgatagccctgcccaagagatgtataaacctgtctcatgcttgtgccccatttataactgcctatgcctgagttaccagtctgccctcagccgacacgtacttttccgttactgacaactttcttcaacgactcgaagaacctttcatttgagaaacgccaagaagcggcaaatgaatggaaacccgcccaacggttattaggaccgaaattggaattaccatcataacgataggtataagtcgctaaataacggtcactataattataattcaaacgagcaaagaatgaaaccattgccgaactaccaaaagctgaaccaatcgttttattgtcggctcccagttgaggattatgaacggcatcggaaggtaaattcgtactagacacagcagtgtagtcccacttactttcccagcattcttgccccagcatggcagtcagattatgtttaccaaatgtattattatatgtaacgtagttcttaatttgccaaaatgttgaactatttttctgcattctgctactattactctgtttccaggtacctagatcaataatcggtctatagacgtcagccttactggaactgatgtcataacctaattcggcccgccaagtcaggtttttgagaggagaaatctctgcatatatgttacccgtcaacttcttacggttcagcttatttgaattttccatggccaaagcaataggattacgcgaagtataattctcacggactaccgtcgcatagctaccatccatattatagataggtacatccggcaatgaagtcatggcaaaattaataataccttcctcaccttcagcaagcttcaaatcatcattcgtgtcggagaatgttgcgctaagtcccaacttcaaccatttcttgagttgagcatcgagattggtacgcactgataaacgattgaagtttgaaccaattaatgtaccttcctgatccatgtatccggcagaaacataatactgaatcttttccgtacctccttgcgcaccaatctgatgttggtgctggaaagccgtctggaagatagcatcctgccagttggtccccacgccaagtagagatgggtcagaataatatgcactttctttcaagccaccatcaaacgtccttgtaaaatcattataataatcagcatactcacgcaagttcatcaggtcaagacgtttcgtctggcgctgcatagctaccataccatcataggtaaatttagcttcacctgccttaccgcgtttggtagtgataagcactacaccattggcaccttgagcaccatagatggctgtggccgaagcatctttcaatatctccatgctgacgatatctgcgggattaatcgtagaaagcggagatatagtagagactgtaccgttacccaacgcatcgccaaaaccataatcaccaccgctttgtccaccaccctgcactatcacaccatctactacatacagcggttcggcattggcattgatagtggcctgcccgcgcacgcgaatagaagaagaagagcccggcgcacccgaagtctgcaccgccgtcacaccagcggcacgtccttgcaaagattgatcaagattagtaataatagagcctttaatagcgtcttcgcccatagatactgaggcgcctgaaaggtcactctttttcattgtaccatagcctacaacgaccacttcatccagaagttcagagtcctccttcattaccacattcacaactttttgtcccgccttcaaggtaatttcctgctgcttatatccgatacaggaaattaccagaacatctttaccggtcggaacactcacactaaatttcccatttacgtccgctatagaaccggtaccggttccttttaccaggacattggcgccaatcagaggggaaccatccgtaccgtcagtaattgtaccggtaactgtggtctgttgggccatcacatgacagctcaggaagagcgtcatcagaaacaacataaagttcttcatactataattattagatttaatatgtcacaaatctttcacgacaaaggtagatgatatcagtagcgcaaacaagtacaattttatctggaactaatactatatttacaaaataacagtatcagttccatacccttgctttaatgtctgaattgattatatgattctattttttctgtagttcatcgcgtactatctgcccccattccttcatatcctgatcagcccaattgccgtcagaagaagccgagggaagaagcattgagcaagtctcattcttatccgaaacagaccacgctacccaacttatggaacgttgctgcatccagtccagccagttttgccactcttctttatttaccgcaccatcgccactggcctccataccggcacattcggatataaataccggaagccctttgcccaaagcatagtctgtacggtcacgcaaccattgtccgtgagtattagcataaaagtgaacagtatacattatattattataaccggtaataggatcatctgctgccaagtgaatatcctgatcccaatgcggacaacctaccagaataatagcctctggttctatagcacggatggttttgataatttcgacagaataagccttcacttgttcccagctatcttccaccggttcattaaacacttcataaatcacattagggacacccttataacgggttgccatttgtgcaaagaattccttggcttcttcctgacgcagattatggctatgccagtcaatgattgcataaacattattttcaatagccgcatccactactgtcgtaacacagttaatgccaaactccggcttgtatacatagcaggcactatccaagtccactcccatagaagctcgaagcacctccgcaccccaatctccagaaagataagctacggtagaagcattatagaaacgaggccaaaactgatgccacccataactgacacctttcagaacaaccgtatcgccctgttcattcatcaattgcgtaccagtcacacacagacggggcaactgctttgcagcaccttcctgatttgcttttttagacgcacttgccccacatccaaacattgcgatcagcagacaaacggccaacaaacttttccagatattcatcatattatttcaattttgcattttcagtttttataatctcaacagtagtatccgttgcaaaaacagaattcaatccctgctcttcctgagccggatctccggtgtaatcatctcccttttcccaatagatatggtcggaattctgttcagcaaaaccaccccatgcccaaaagttacatccggcaaaaagtccgccgttctcccggtcctgacgaatcaaatcaaatacatattgataatattcatcacgaacttctgtcgaagtacttttagaaaaacgaaaaccgtcacgagggaagccaaattcttcaagtaccacaggcttcttatatttctgcgcaatcactatgtgatcattaatatatttcttcgtattctccttagctcgcggaagaagttctttcaaactatcagcttttacccatccccagttataaggccaaatatggatattcagatagtcaatattcggatctgcatgcactctttcatataatgcaatatccccctcacatcccgcagcaccttcacttcccgaagaaaccatatgattggaatcaagtgacttaataagagcggcaacatctgccatccattgagcgaaaggctccttgttttcatcggaaaaagcgcgaggctcattgcctatctgccaggacataagcgttggatcatccacatattttatctgattatacctatttgttcttgtgacgatgtctttgacataattagcaaacaacaccttcgcgctatccgattgctgaaattgtttcacatactccatataggcaggccaaccgtctattgcaggcactacagccttaccgtgtcccgaccattgcagatatacagaataaccaccactccactcccaagagttattcaaataaagtacggcagtcatatcccgtttgcgcaactcattcatgaagtaatccaatccggctaaaatagtatcattatacacaccgggagctacttgcagagaaggttgtacacgggttttcacaccattttcaccgtccgcacctaccaatacacgcaaattattaataccgatacttttcagaaaatccaattctttatgcaggcgttcacgattgcctccttcaccttcagaaccaagaatggcaccgtaccagaaattggtacctacataataatagggttttccattacggatgaactgtccgttcgcattcacatgaacgaatgagttttcaacaggtttaggagtacatgcacccaaaaaggataaaagaagagtcaataagaataagtgtctcatattatcaggttttagtaacaattttatcatttccctattcccatctgtttccacagccatgccagccattcgtcccattgttcctgataccaataatgaccagtttcaagatatggatggagttctttgggagaagtcaccgcattataagcggcatacatggaagtcggcggacaaacatcatcattatatccccaactgaaccagccggatactgtaagacaacgggcaaagttcgccgtatcataataacgcaccacttccagttctttagcatcgggagcaccataataatagaaataatgcggccagccacaagcacgtttcttcataaaggcttcatgatcgcacagtgccggatgaacggcagcaaagaaagtgacgcgcggatcaagggccgccgtcatcacagaaagtgccccaccctggctggagcctgtcacaccaagtgcctgcccgttatattgcggcaaatcacagatgaaatctactgcacgcaaagcaccgataatcacccggtgataatagaaattcctcaaatcattccggcagaaagtccaataaccattcaatgcaccattcatcaagttatcataaaaagattgctccatagtaacgggaataccgtggatgccaacttccaatgtgattacaccttgttccgctgtataaacatcgccggcatacggacgaatgccagcaccgggcacacgcaacagagccggatacttaccttcttttttcggtacacaaaggacaccatagaaacgggaaccccaacgatctgtctgaaagcttacatgataaacattgactgttgcagtgcatcgttcgggaagcagagtcatcaagggttgaagcgatgtccggcgggcgccttccagctctttcacccaaaattcacgaaaatccacgggaaactccgtaataggctgcaattgttcgggagcataagcagcggtcgccaatccttcgtatttacggtcacctacatgtgccgtcactttgcaacgcaggaatccgggtgtcttcatcgtcccttgcaactttaattcaccattcttcagtaatacgcctttcttgacttcggtaggatacatctccggccccagctcataatccaccgtcacgttctgcaaaagattctgagccttcagcaccctcacggtaaatgtacatttgtcattcaaacgataattccaatcggtatgatcaggagaaaccattacacggatttcattaccgcgtatctgcgctgttgcagcaagcatacacaacagacatccaaaaagaagtgatatttttctcatggtagaaaactaagatttgttcgttgttgcaaatgtacgtggtttcgaagaagaataatgatacaatattatcatatcacaatcttcttctttctatagttttccctgaattcctttggtgaacaatcttttttacgtttaaacatccggttgaagttggacagattattaaagccgcaatcatagcagatttcggcaatggtatgcgccgagtccaccagcaagcgtgtagcaaaccctagacgaatatctataatatagtcggaaagcgtcttccctgtacgcaaacggaagaaacggctgaacgaaaccggtgtcatacccaccatatccgccagagtattcaaacgaatatcttcctgataatgatcggcaatatatttctgtaccttctgcacccggcggctgtcagagaatgtctcgatcttagcaaaggaagaactggacagcacctttgcatcatcatacaaagacaactcataaaggatgcgcagaaaatgcatcaccgcatagaatccctgttcttcggaagccagtttatccagccagttatacaccttcatgatggcttgcatggggaaactaatgccgcattgcgccttttccaacatacgccggatgctgtcgaactggtttttattcatgaagttcttgaaaaacaggtcggatgagaactgaatcgtgatttcccgtatctccttcgaagtacattcgtgttgctcccacacatgttccagctctttgccggtaatcagtaccagatcatagtcactgatcacctcggcagagtctcccactacccggcggacaccggctgcgtgttccgtaaagtttagttcgaattcggcatgacagtggataggataagtaaactccgtcttgcgacggtcggcgatataaaaacaatcgcggtcggacaagggagtaatctccctcataatgtagtttgagttttccatattgattggttaaaatagtatcatgtcacaaaaataaccattctttttaatcccgaatggtagaatttgttttattatggggtaagatttgttataaaagaaagaaaggttatacctaaccatcggaaaggtataaccttaaaagaaaaaagcaataactgtattttatttctcctattttatttcacaaagaaagaatctttcagcagatctttatcatcagaagatgcacccaccatcacaatgaactcacccggttctacaatcttcttcatctttttatcatagaaagccagtttatcgggagtaatcttaaagttcacgacctgactttcgccggctttcaacgatacgcgggcaaagtctttcagttccttcaccggacgggtgacgctactgaatttatcgcggatatacagttgcacgatttccactccatcacggtcgcccgtattcgtaacttttacactcacatccaccgtaccgtccttagtgatttctttctgtgccaattttaggtcatcatatttataagtagtataagaaaggccgtgaccgaacggatagagcggagtgcttggcttacctgccgcataaggatggaagtattgtgacggcttatggttgtatatcatctgcaactgacctacactatgaggaatcgtaatagccaatttggcggacggattcacctgaccatacagaatttcggctactgcctgaccaccgtacatccccggtgcccatgcttctacgatagcgggaagattttcggccgcccactgcacaccgagaggacgtccattcaccaaaataagaatagtcggtttaccggatgcagccactttctctatcaactcgttctgcaaacctacgaggtcgatatccgaacggtcggtatcttcaccgtccgtacggtcgttccaacggaagcgcatcatatattcgcctgccactacaatattgagatcagcactcttggcacgcgcggcagcttcagccactttcttcggatccatgttgcgcgggtcccaaccctggtctacaaaatcaaactgagtatcgggagcaatcattttcagaccttccaggatggtagttacgttttcatctttctcaggagcactccagtcacccaggatattctggtcgtcggcattgataccggtcaccatgatcttcttatatctggaagcgtccagagggagcacaccgtcattcttcaacaatacaatgccattgcgggcagactcaagagccgttgcacgatgctcatcgcaaaggcgcactttcatggtttcggcctcatcggcataaggttgttcgaaaaggccgagacggaatttgatatccagtatgcggcgtacagactcgtcaatacgagattctgggatacgcccctccctcactaattccactaccatttcgttccagtggataccatgcatgtgcatgtccatacctcccataatagactgataaaaagcttccttcagattttcggcagtagcatgcaggtcatggatatgttcaatgtccatccagtcgctgactacgaatccgggaaagttccattcgccacgcagaatgtcttgcatcaaccactcattgctatgacaaggaataccgttcagctcattgtgggcagtcatcagagacatggctcccgccttcactcctgcctcaaagggagggaagaaaacttcacgaagtgtacgttctgacaaatcagtgggagaaccgttcgttccgttgatgggttcactgccaccgacgaaatgcttgatacaagccaatacatcttcgttgccattcaaatcgccttgataacctttcactgactgtacgcccagtaaagtgaccagataaggatcttcaccatacgtttcgccaacacgtccccaacgggcgtcgcgggcaacttccacattcggattaaacgtccagtgcatgttcatggcacgcatttccttcgctgtctgccgggctatcttataggccatcagcgtatcaaaggaacaggcaagattgatgttggtgggatataccgtattatccggcgcattggcattgccatggatggcatcgataccgaatataataggtatctgcaagcgactcttcatagcgagagattgcagatagttggcttcttcaatggtcagcacatgcagaaaagaaccgaccaggccttcttccgtccacttctctatatctttctccgtaaagccgggatagaaagcatttgccgtattattcttcaattcttcttcggtcatcacggcactgtttgccttgatatgttccacaccgacgaactggttcatctgacctactttctcctccagagtcattcttttcaagagatcttctaccctgtcctttacgggtgcggtagagtctttatacacttccttctggcttccgccgcaggaacacaaacaagctccgattgccatagttgcgattattttcttcattattattagattataaattagctcgtagctatataccgttacccccgcaaagatagcgctctccggaaacttccggtaacattttcttatccaattatagtataatttgtttccagtcggggcatctgttgtaatccgctcacttttagacaaagaaaaacggtcttttccggagaaattgcctatttttgtttcccgataaaagtacatttctcacttaaactgaatgatatgataaaccccatttactctcccgattccaagcggtatgacaacggcatgaaatatcgtcgttgcggacgaagcggcatattgctgcccgaagtttctttaggtttgtggcacaacttcggagatgtaaacaccttctccaattcgcaggcaatggcacattacgccttcgaccagggtatcacgcatttcgatctcgccaataactatggcccgtcctacggttcggcggaagaaactttcggcatgattatgaagaagtcattcatgccctaccgggacgaactgtttatctcaaccaaagccggacatgatatgtggcccggtccttacggtgaatggggttccaggaaatatctgatgaacagtcttaatcagagcctgaaacggatgaatctggattatgtagacatcttctattcgcaccgttacgatccggaaactccactcgaagaaacattgcaggcgcttgtggacatcgtgcgccaaggcaaggccctgtatgtgggtatttccaaatacccgaaagaagcagccgaattcgcataccgctatctggcagagagggatgtgcactgcctgctctatcagggaagatacaatatgttcaaccgggaaccggaagaagaaggtattctgcaacaggcacgcgaaaacggtaccggtttcattgccttttcaccgctggcacaaggcctgctgaccaaccgttatctgaatggtatccccgaagattcgcggattgccaaaggtggattcctgaagaaagaagcgctgacaaaagaagtgctcaatagaataaaggcactgaatgaagtggctgcccaacgcggacagactcttgccgaaatggcgttggcatgggtgctgaaagatgaaatggtcacttcggtcattataggtgcaagttccgtagcccaactggcagataatctgaaagccatagaaaatacaaagttcacagcggaagagttggaaacgatccaacggatactggactaaaaaggtatagtaatgagttttcaccacagagtaacacagagtttcacggagttctattcatttgatttcaaattgattaaactctgtgttactctgtggtgaattaattcataaccgaaaaaaaaagaataaaaggttaccgaaggatattctgttactctattgataatcagcaaatagtatttaccaatagtttactgaaatatgtaaaagcatttaccactgtatgtaacgacacttcccccttattgtaacgacatttacctcgatatgtaacgagctttacctcggtgtgtaaatagagtcaccgtgtagagtcaacacagttatcatttggggtaaactgaattttcatgaaaggaaacatctgtggacttatagcctgtaaaataccgtctatgcacctattcccccaattcagagcgccccgtttttctgcaaaagattaaaatttaacatacccccttctgaaccttttattttttatcttgttcatgtaccaaaagcctgaggtaccagggcaggatttttatatttaacctaaacattataaaagtatgaagaaattaattcccctattattggtggtcttgactttcgcagcctgcgaaaaagaccctgacacggataagctggacaacaagtatctggtttataccaactatgacacgaaagctgatttcaaagctttccaaacgtactacatgccggacagcatccttatcatcggtgataagaaagaagctgaatactggaaagacgagagcgctcaggaaattctgcaagcctacgctaccaatatgaacaatcgcggttttgtccgtgtagacgatcgtgaagaagccaacctcggtttgcaggtcagctacatcaagagcacttactactttaatgactacggacgtcccgaatggtggtggaattacccgggctactgggatgcaccttactggggcaactggggcggatggtactacccgtatgctgtgacttatacatatagcaccggttcattcatcaccgagcttctcaacctggaagccactcaaggcgaaaaggaaaaattgcccatactctggacaagctacatgagcggattgcttagcggttctacagctgtaaacactaaattggccattgaaggtgtgaaccaagcctacactcaatcttcttaccttactaataagtaattgttagtagtaaatagttaagtagagaggtacagcctgaagtatctcataactaaaaacaataacaagtatgaaaacaataaaatatctttctataagagtactggcaatcactgccctggctctcgtcttcgccatgccggcaaaggcacaattaaccgataacggttatgccaacatcgattggcaattcaacttccccctgagcaaccacttcgctgataaagccagcggatggggtatgagttttgaaggtggttactatgtgactccgaacattgctcttggtgccttcctggcctaccacagcaaccacgaatacttcggtcgtcagacacttcccgtaggtgaaggcggtagcatcaatactgaccaacagcacactttgttccagttgcctttcggccttgccggacgttatactttcgaccgcggtagcgctttccaaccttacgttggattaaaagtaggtcctcaatatgccgaaatcaaatctactttcaatgtgtacgaagctaacaagagcacctggggcttctacgtatcaccggaaattggtatcaacatctacccatgggcctatggtccgggtctgcacgttgccgcttactatagctacggcacgaacaagggtgacttgttcacatacagtgtagatggcttgagcaacttcggtctacgcctgggtattgcattctaacataatttgcattgcaacacaataagtttgactggtattaattgattgtttcaagacgtgaaaaagggaataaccggccgcgtgagcggggggctattcccttttgtagttacgaactacaagatacaagctacaagttgctgcgctatgtttacgaacaattatgccgcatggcacttgtagctcgtagctcgtagcttgtaactcgtaattatttcaccgcctgatacatcacttcctgtattcgtgtacgaatatccatcttcatcagtttcgtattccatacattgggataaatgcgattacacaagaagacataaacaaggccgttcgtcgggtctacccaggcacaagtacccgtaaagccggtatgaccatagacggtagaaggggtagcggcagcgcatgggctctttgccggattctgacggtcgggcttatcaaatcccagaccacggcggctgatgcgtgaaaccgtagtagtaaatacacggcaagtctccggactcagataacgcttgccatccagttcaccaccattcagcaacatctgataaattcgcgctacttccgttgcattagagaataatccggcattacccgatacaccaccctggaaagctgccgactcatcatgtacaaagccctgaagaacagtcttccgcaagaaaggatcaaaggaagaaggtataatttcggctttcgacagaggagcatggctaccggaaacaatgccggcataagccgttcccgcagtagctgcacctcgcagcggcaagtatccggtacgtttcagtcccatcggagcatagaactcctgctccagaaaagcatccatcgacattcccgcacgcgcttccaccaactgctgcaacaggatgaagccgacacaactataccgatagcgccggtcgcgcaacggagtttctataatcttctgccggtatgcctccttgaaggagcgattcagccacaagctatcagaaacctgcaatgtatactctgccgtgcgtactttggatgtcagccccttctggaacttgaacttcgggtttgcccaagtacgtacaccgatctgtgcagaatgtgcggcatcgggttttgccttgaaaagagttccttcataactttccttatcgatagcttccagatagaacaacaacgtggaaggcaatccggactcatgcaacagtaattgccggacagtaatatcctttttatccgtatcctgaagccaaggcagatagtccgacacacggtcagtaagattcagacgtcctttatcatacagcttcatgacggcaagcaacgttgccgtagtctttgtcagcgaagcaagatcgtaaacatccgtcggggataccggcaaagtagcacccggaataacggatgcagaaagcctattggcagaagcgcccggccaggtatgcgttccgaatgccttattatacatttcctttccatctttcaatatcacgatctggcaaccgggataggcaccttccttaattccttctttcgcaatctcatcgatacgggtcagcagacgagaattcactccatactcatcgggcacaaagtggagtggtgtcttcggagtaataacctgccccgtacctgtggcaaacaaattgctgatgcttgccgaaagacgtccgtcggctgttgcatctccataaagtattttggctgtccggcactgcacatcatctatcgaagaatgtgccaatactacggcgtccgcagcagacactgcccggcgtatctgcaacatctgcttaccgggaataaaaagcagataaaccgccggcacatcgtgagtaaactcggcaaagaatggttggtagggtgccagacgatgttccgtgacgcagacaagaatacgtttatattgcgacaatgaatcacgcaacagcttgcgtgcagcagactgcaagtctttcttcagctgaaagacggtgggacttcctttcgtcccggcggaatttatatatccggagagttctttcagaaacggctgtacctctttcgcatcccccacattgagcactgccacttcacgggtatccgcatccagcggaagcacattgttcttatttctcagcacagtgatcgcctcctggttcagacgccgtatcagatcacgcgtatgtgccgtattgatacggtttcccaaaccggaaagacggacaaaaggtttcttcgacaatccgagagcatatttataggtaagcactttccgacacttcgtttcgatctccgcttctgtcaactcaccgctcttcacggcatccagtatagcttccacctcttcctttatccgccggggaacgagcaacaggtcgtgccccgcctgcaatgcctgcaagcaaatactcgtgttattggcagatactcccttcatggcaagtgcatccgtaaacaccaaccctttgaactgcatctcctgtgtcagcaaatcatgcaccactttacgcgaaagcgaggaaggtactcctcgtttcggctcaagcaccggcacttccaaatgtcccaccatcataccggacagtccggcctgaatcgcctttctgaacggataaagctccacactgtccagacgtgcacgcgaaaacgacaacttcggcaatgaatgatgcgaatccacatccgtatctccatgaccgggaaaatgcttgcttacggaaagtacaccgccatcttccagtccacgtgcataagctatcactttatccgccacatttaccggactttctccaaaagagcgggtattgataacgggattcttcggattgatattcacatccgccacaggagcaaagttgacttgcacgccaagctcacggcactgccgggccatctcgcgcccgtactcatagagcaggctgtcgttttgtatacagcccagaaccatatttcgcggaaacaccggtgtaccccgcaaacgcatggaaagtccccactcaccatcgaaggtaatcatcaacggaatatccgctattttctgcgcttcattagtcagtgccacctggttttccattaaaccaccggaaaaaagcaggccacccactttgtagtcgtccactactttgcgcaacaggtcgcggtttgctttatcctgttggggggcaatggtataaatgaatagctgtccgatacgttctttcagactcatcttgttgagcactgagtccacccactgccggcagcgggcatcattggtaaagggacgcatcaggataggttcaacaggcgtaacaggggattgcggtgccggtaagcgatgtgtctgagcatcaaaacgggcacaacaactgaatagtatcaagaggaataggaatagtttcttcattattatctatacattaaggctaccaaagttatagtatttcaaacacaaagacacggaaaacacagagttttttcgactaattagtaaaaaacactgtatttcccgtgtctcccgtatttctatgttccagctatttcagacttttataaatcgcctcctgtatatccgtgcgaatattcatttcacccaatttcgtattccacacattgggacacaggcggttactgaggaagacgtacaccgtcccgtgttctggatccacccaggcacaagtccccgtgaaaccggtatgcccataaacggcagcggtagcagaggcagcacaaggactattcttcaaatccttcagattaggtttgtcgaagcccaatccccgacggctgatagcggaagtttccgtagtgaacaggcggcaggtcgcttcgctcagatagcgtttaccgttccattcgccaccgttcaatatcatctgatagattttagccacttcggaggcggtggagaagagaccggcattaccggatatgccacccatgcaggcagcagcctcatcatgcacatagccacacaagtcctgacgacgcaggaagtcgtttgcagccgtaggcattatctcttctttggagtatttctgcaaaggcaggtacatggtacgctgcaagcccataggcgcatagaactccttagccagatagaggtccatcggcaacttgacaattgactctaccacctgttgcaacagtataaagccgagatcactgtacacataccgcttactgtccatttcgcaacgggcaatcttttgcaggatggtattcttaaagctcttattcaaccacatcttatcagctacatgcaagttgtaaaccgatgattctttctccgacaccagtcctttcttgaacttgaaatccgaacaataatagctatgttcgcttacccgcgtgcgatgccattcatccacccaactttgagcatacggtccatgcacggagttcgggtcgataacctccagatagaaacgaatataaggcggcaggccagactcgtgaagaagcaagtccttaatcgtaatattcttcttattcgtacttctcaggaaaggcaagtattgggaaaccttatccgtcagttttaatttaccaccatcataaagtttcatcacagcaagcagcgttgcagtagtctttgtcagagaagccaggtcgaacagatccgtaggacgtacagcagtggtatccttatcggaatgtataccgaaacatttatcatacactgtctgaccgtctttcagcaccagcacctggcaaccgggataagctccggcagccaatcctgcctgcacgatagcatcaatgcgatgtaactcattggacttcatccccaaatcctcgggaataatacttcccggcttcatccccggagtgatcacacttccctcaccggcctgataaagacttccgatactcatggaaagtttgccttgggcaggcactttggcaaagatgacacctgccacatattgttggatatccgcttcagaagaatgtcccagcactacggcactggcttggttcaaagcaggctctaacggttgcattccacgataagacgtaaaaaaagcatataccagcggcacggacaagtccaatcccgccagaaaatcggcataagcaaccacatcggcatcttttcccgatacgctgaccactatacgccgatagtccgccaacttacgcgccagttcacggcggccatcttccgacatttctcttgtcaaacgaaaacactccataggaacaggagataatttcttcatctcatccacaaaaacactgtctttgccttcgcctatactcagaagagcaataggagcaccaccgaccggtgtcaaaggcaatatcccgaaatgattgccaagcaccgtaatggaggcttggcgcaacctggttaccagagccttcgcctcatccgtatggatacgatagctcattccgctaacttgtaactgcgggcgtggctggcgcaagcctaacaaatatttataagtaagtatcttacggcatttcgcttccacttctttctcagagagaacgccctctttcacagcactcagtacttcctgcacagcgtttgctgtgttgtactgcaccaataccatatcatttccggcaagtaaggcttttgtagtaagctggggcacagacgaaacacctttcatatccagcgcatccgtaaacaccaagccctggaaacccatttcatctttcagcaatcccgttactacatttctggaaagtgaagatgccgttttggcgtccggttccaaagcaggcacttgcaaatgacctaccatcacaccgcccaatccggcacgcaccatttcgcggaacggatacagctcgacgctatccaaacgttcacgattatagtagagcaccggcagtcccttatgcgagtccacgtccgtatctccatgaccgggaaagtgtttgcttacggacagcacaccaccactttccaatccacgactgtaagccagcaccttttcggctactttcttcggatcttcaccgaacgaacgaacatgaatcaccggattcaaaggattagtattcacatccgcatcaggtgcaaaattgacatgcacacccaattcacgaaattcccgtgccacctcacgtccgtattcataaatcaactgattgtcttcaatacagcccagagccgcattctttgggaaataaggtgtaccttccagacgcatggagagcccccactcaccgtcaaaagtgatcataacgggaactttggagttcttctgcgcaatattcgtcagtattgcctgttcttccggcgtaccttcggcaaagagcagacctccgatcttatacttcttcacaagatcacgtatctgcttctttttctgcttatctgccttggccgggaaggtagtgacaatcaactgccccactttctcttgcaggttcaaaccggaaaatacggaatctacccactgtttgcaacgtgcatctgccgctgaaggcagaaaaggggcttctgcctgggcatgaagcaaggatgtgccaccccataaaaggatagccaacaacaagagaattgttctcttcatttttattatgtattacttagatgatggttgggcttcttcttctgtaagtgtcagtttcaacattcccacataaattccactttttcctgtatgcatcacaggtacattcttaccgtctttattcaaataaatagccggctctttcatgaaagtatgggtatgtccgcccaatatggcatcaatattatttgttttctgtgccagttcttcgtcacaaggagcacctttaagctgataacccagatgcgacaagcaaataacgacatcacaaccttcctgattcttcagcagatccgtcgtcttctgtgccacttctatcggatcattataaaccacaccttcacatttatcggcctgcaccaatccttccatcttcggagcaagaccaaagacaccgatcttcaatccattgcggctgaaagtagtataaggtttcaccagtccttccaacaccgtacctgttacgtcatagttggcacataccactgggaagtttgccatacggaacagacgtgccatattttccagaccgaaatcaaactcatgattaccaatcgtcatggcatcgtaccccataaggttcatcatcttgacttctacttctccctggaacagattatagtaaggagttccctgagagatatctccacagtcgaacagcaacagatcagggttcaccttgcgtgcctctttaataaaggtggcccggcgcacggttccgcccataccggcatagcggtcggcagcatttacagcaatgggctcaatgcggctatgtgtatcacttgtttgcagaatcaccaattgcttggttttctgtgcagagtcaggagccagcagacaaaggggggccttggagatttcccggatagattgttgtgctgatgccggaagaaggcagcagactgccaacgttaaaagaatatatcgtttcatgatttctgatttatgaattatgatttattttctcggtgagcaggattactcatctttcacagttactctaccttccagacgcgaagtgatcttctttccggcagcagtttgacgttccacatagtccatgaacaggccgcgcaaagtggctccgtccggacattcccgtttctctgcctgaggcaaagcagtcattccgtcgtttccgtcagccagatagtcgattgtagcaatcgtatagagttgatcgtcttctatcggacgcccgccaaccgtaccttgcagcaatttcccgtctttcgtaatcaggagctgtactccactgataccttcaccatgacgcacagcgatattattaaacagttctttcagatagactcccttcattgttaatacacaaagggaattttcgaaaggtaatatctcatagatattttcggtagtgatagggccttctgtcagtacattacgcaaaccacccatatttatcagccccatatcggcaggcttgcccagcacttgtgcggcagcattgcgcaatacatccgctaccagattggaaagcaaactctccggagctcctttatccatactcatttccgcagtacccaccacacgatacatgatactgtcaacttttgccttataaggagcaagcagtgccaccgcttcagcatccgggttcacatcccaagtagagtcaatcgccaccatggttccctctgacttcgtcaccttatatgcagaagtacaagaacttagcaggaatataactgccagaaatacaccgggaataaatttcaaagttattcttttcattttgttcgggtttttaaattgctacaaatataacgaatagtctttcttatcctgtcctgacggaaagaaaaaagatgaactttttcgttttcagacacattttttaagtttcgggatatttcgacattaaacggcttacacaacttctgactgtacccgagatgcacttgctccgtaccaagtccgggatttcttcggtcagaggtgcttctgagcgaagaaggtacggagcaagtacggttgagacacagttatggcggggcatgaacaacacaatgattcattcactatgctaaaccgagggtacttcccactacgactgaagatatctcccactacgactgaaggtacctcccactaggactgaactcgtgtttcactacgactgatcatgatggaacaccaagtttcttgtcacacaggtggttacgggacatatgaactttggtttgctcttctcttttcggttatgaattaattcaccacagattacacagattgacacagattctattttactgattattagattaataaatctgtgtgaatctgtgtaatctgtggtgagtcttattcattactataccgttatgaatcagctaccgactacaagctacaagtgcctttcggaacatagcgcagctacttgtagcttgtagccgatagctcgtaacttttccgatatgatcccaattcaactcctgatgattcgcataaataataaaccacctaaactcacgttatttaaattatacgtaagtttcgcatatagcctttcaggctgacatatatgcaaaactttaaaaatatacctatatttgaattccgaaagtaatataaaagacaggcagatacatggaaataagtgtggcaaccgatcaggaatggcatataatccgctactcagcaggagataaagagcgctgggaccgcttcgtgcgccgctccaaaaacggtacgttcctcatgcagcgtgactatatggattatcatgccgaccgtttccaggattgttccctaatgatcttctgtaaccggaagttaacagccctgcttcccggtaatctttccggcagttgtttctattcccatcaaggactgacgtatggcggaatgctcctttctccttccatcaccctgcaacaagtagaaagcgtatttcatgccgcactcgattatctgcagaagaaatgcagtgtgcagtcgatagtctatcgtgctattccacatatctatcaccgctatcctgcagaagaagacctttatgtcctcacccggctgggtgcagcccttgtggcacggagcatctcatccgtcattccactggacgaccgtctgcctttccgtactctccgccgtcgccaactgaagaaagccctggcatcctcactgacgattgcagaagatgaagactttgcttctttctggccgatactggaagaaaacctgcacgaacgatacggtgtctctcccgtacattcactagaggagattacccgtctgcacagcaatttcccccgccagatttcccttttccgtgtatgcgatggagccgaaacattgggtggatgcattgtgtatgagactgacgaagtagcccacgtgcaatacatcgcagcttccccacgcggaaagaaatgcggtgcgctcgacctgcttttccaccaattaatatacgaccgttatgcgcagaagcgatacttcgactttggcatatctaccgaacacggcggacaaatgttgaatgagggattactcttccaaaaagaaggtttcggcgcaagagcaattatgtatgacgtttacgaattacgcttatgataaagtatttagacctgcaaaagatcaatgcctccttcgaacccgaactgtcggatgctctgttgcgtgtttcccattccggatggtatctgcacggggaagctacagcccgttttgaagaggagttcgctgcttattgcggtacttcttattgtgttggcaccggaaatggtttggatgctcttactttgatatttctggcttaccgggaactgggagagatgaatgcaggagatgaagttattgttcctgccaatacatacattgccaccctgctttccattcttcgtgccggcctgaagccaatgctttgtgaaccttctttcgaaacatgcaatatagatgctgcctatgccgagacactgattaccccccgcacgcgtgccatattgcccgtccacctgtatgggcgtttagctggcatgaaagagatatgcaagttagccaaccgctacggactgaaagtcatagaagacgctgcacaagcacatggagctgcctggaacaaaggtttaccggggaaagggaatcatcctctgcgtgccggaaatctgggagatgccgctgctttcagtttttatccagccaagaatttaggggcattaggggatggcggcgctataaccactcacgatgcaaggcttgccgctacagtgcgttccatagccaattatggctccacggagaaatatgtccatcggtatcaaggtataaacagccgtctggacgagttgcaggcggcagtcctttccgtgaaactctctcgtttggatcaggataatatccgtagaagggaaatagcgcaattatataaagaagggattgactggcagcgtctggaattacagagtactgtccatacgaatgatatcaatgaagccaatgtttttcatatcttccccgtcttttcttcctgcagagatgaatggcaacgttatctcaatagtcacggcatttgtactcaaattcattaccctatccctccccatcgccaggaagcgttgaaaaaagaatatggaatgcaacaactccccattacggaacgcatccataatgaggagctaagcctccctatatctccattactgacgaatgaagatatagagcggattattaactgtgcaaatacctttgtttagaaattcaacactttataatacgacgatttcggcagtaagttttcgtcaaacagaagcggatagttacgctgacggttaccacggcggcgatccagccatgaatcaccatcatatacattccagaaagtaacattgctaaccacattcttgtattcgcgcatcacccggaacagcatatcatactgggctacctgtgccgcatccgcttcaggagtcaattccaacgtcctgttatcctggttcacactcaactgtcctccctgctctttcgtattgatacgaacgtccagttcagtgatatggatattatcaaccacctgcgaataaagctcgatagcctttctgaactcatcctccgtaggagaaagggtattataatgtccctgcattccgatgccggagatgggtattccctcagccttcatgcttttaaccatattataaatgcggtcacgcttcgccgggttggtctcattgtaatcattgtagaaaagcaatgcttttggatctgcctcatgagcatattcaaaagccttctttataaactcgtcccccgcaatcttataataaagagactgacgataaggaacttctgctttcggatcatccgtcatcgcttcgttcactacgtcccaagcatagacaacatccttatatctatttacaatcgtatggatatgttttctcattctctcaaacagtacctccttggaaaccaaatttcccttttcatcatgaaacatccagtccggagtttgggcatgccagacaaggcaatgaccgcgaagccctattttattggcacgggcaaagttggctatcttatcagcgctctcccagttccactgtccttccacaggctccgtaggctcaggcttcatatcgttctctgcagtaatactgttaaagttggaagtaatcaatgccatctgttgaggtgaattcagatttgccatatttatggcacatcccacagtgaaataatcagcatacgcatctttcaggttgttcacaacaatatcattcgcagaagtagcgtacaatcctatcagacaaccggtaaaaccacctgccacgttcgttgaaagaatatcaccgggcacggtatttcccaactgtacgaagtcagttccatccgttgaataataaaagccatagccatctccttcaccctttactcgcagttgaatgggattcttcacatctactttcgcacttgcaacaagtccggattcacctcttgccgttctttccagcaccatgtagaaatctttatccttctttgtcaagccaaagacataattgaatttttcactctgtacgcaagtgatgcctgccagatctttctctgtcttcggaacatactgcaatgtggtagtaaacgagaagttattatgttgctgtctgtagaagagggtcgaagtaggcttcacctcttttatgttcaccgggaaaggagtaatctgcaatcctccgtctttcagtactgagatgaactcttcacgagggcctctcaaaccaatccagcggtagtccaattgcggagatgtgaagttttcagtgaacgtaaaattgccattggggaagtaaccgtcttttccggttttattctccactcctttaggtgttttcaacttcggctccatcggaatcaatccgttttcaaagacagggaattctcccgaccagtcaaccggcaggataaacgtttcacggccaatgttcactctgcccttctcattcggacggatagccaggaacacaccgtaatatttgccgtcaggaccttccactaaatcggcatgtccggcccaatccaccatattcttccggttctgattcaggtatctctggctcaggataggattattgggagccggaataaagggacctttcgggctgtcgctcacaaagattacttcactatgccaatctccggtaccgccttcggcacacatcagatagtagcgtccattcttcttatagatatgcggagcttcaatccagataggtttcttggacaaatccacaccaccattcacaataacctgatccgaaccgggaatcacctgatcgttttccacatcatactcccagattttaatcacacggtgtccgttatagagttcttcaccacgcttcggtccgtcattatgaaccacatacgccttgccgttatcatcaaagaagatagaggggtcgataccgtcaaaattcaacttgataggatcactccatcctttgaaaggatctttcgactttacaatgatattcccgaatccccccgcaaactgggtggtgatcatatagaaagtatcattattggggttatacttgatggccggagcatacacgccggcactgatacccgtatcatgtactttcagctgtgaggtacgatccagtacatggcctatctgcgtccagttcactaaatcctttgaatggaagataggcacaccggggaacatagcgaacgatgaacacaccaggaagtagtcatcccctttgcgggttatggacggatcggggtaacaaccttgcaaaatgggattataaaactcaccggcctgcaacggattctcgttgtacacctgatcattcccctgataaaccgcctgcaagaataccggagcacccttcacctttttacctttagccccttggctaaaacctgccactgaaaacattgtcatacaaagtgacaacaaaacgatgcgcttacccacggaaagcgtcgatttcacctttttcatgtctaatatcaattatgatttataattactcgttatctcatttactgtcacttatgcggaaataatcaaagtccacataccctccgggagtcttggtagcataattgaatagtccgaaacggtatcccataaaatgcgggagagtataagccatcttgagctggcttcctatttttgtccacttcttaccatccaggctatagtagaaatccgctatatctttcttatctgtaaagtcacattcggctttcagaaatactgtattttggttcagtggcagactttccacctcttccggtttgtcagtctgcgcacttaccattacaatcttctttaccccgttttcatatttcacaccaatccatccatattttttctgaagaagtgcaagccctgcaaaatcgccttctctcatatcagacacatccatagaagtagttcctgaacataccggaccaatcgtccgctgtgtcaacgtgtttcttgcagacaggaaatcagtatctatccgtccggttttgagtcgcagatatcccttccgttcactaactgaccagagagaattatccggattgtgattccactgccaaaccaacggcaaagccgcatctttcttcttgcgtgtaaactcatccgaggcaacaatacccggtatcaaacctttacttgccggcagatccaatgtttccggaacctttccatttattccgagaaccggccatccatcttcccatttcaccggaacaagataagggatacggcctacagaaccattgtcacggaaaagatatgcaaaccatctgccatcaggcgtatctatcaagccaccttgggcaacacctttatcctgcaaagctactctaccttcccaaggaccatttatattatcagcgcggtgaataaccactgtacgcattcctcctttcggccaagtaatattgaataaataatacttcccatttactttaaataactgtgaaccctcggcaggtaatccgacattatctcctgacggagcactggcattctctataaagatacgttcggtaccttctttgatcccggataaatcgggcttcagttccgctatatgcagtttaccacctccccagatgatataaatacgaccgtcatcgtcaaagaaaacagaatgatcatgataagaaggattaaaggatattgctttccaaggacctttctctatatctttcgtagtatatatataggtcttcccggtggtgccggcaaatgttgtcacataatacatattattatgatagcgaatgcagcttgcccatgtaccactgccataagcattcttaccattgttcaagttcagtgcatccacatcggccagtatatcgtaacagtaactcaccaactcccagttcactagatctttagatttcataatgggcactcccggagccatgtgcatggtggtactactcatgtaataagtatctcccacccggatcattgacatatcgggtacatcggcatgaaccaccggatttttggcagaagcgttttgcgcaagagtcgcataactgtagaaaatagatgccagcagaaaaagacaaaaatgttttcgcatagttatatccttttttattattgtttttgaaaagacaaaatttaccgacagcaaatatacagtatcgaatccaagagatacctataatcattttacacattctttcgctgatattacatctttaccgatgtatgtttcataatctttcactcacgttacatcgggcgtctataagtacttagaaggcataacacgagttactttggcaaaggaaaatgattactttgcctaataaaatttagcccttacaatacttagttattgcaagggcaaaatacaagaagaaatgattaatgtttttcccagaagtccagatattggcgggccaccttcacatgatcgtgatacttggctacatattcaatactttgcgccgataattccggaatacgctctttatgaagcactatatcttccaacttttgataaatatcttgctcgtcgggcaggacattgataatgggacgaagttctgtttcattcaatatctcatagttctccggctcaccgcctcccactaccgttactccttttgccatagccaatagtgaattcatggaaggggtatacgaatacaactgatctaactggacatctgcatcatccatcaactgctgatagcgggcataaggcacatcatgcacttcagtgatgcggcaaagctcagaatacttgcgctgcacttcttgcaaaacgggcagcataacatcagtccccttcaaattactacgggcagactgaataccgatgaagaaattcagtttctccggcacaccgcgaacgcgggatattacctcacgcaaatcgataggtaaaggaatgaaagctgtcttatctgaaaagtaaggttgataggaagcgtaatactcccacaaacaggcgataatgccattacaagtttcggctataacccgagtggcacgagctgcccccccataataccaatcctggagagtaatctgattaaaagccgtatcacgataccggtctccgatcttaaaatccgaatagtgaaaagtgcttgtttccatacaagcacgaatataataatagtcggtcccgaaagctcccaaaaagaccttgccattgtgccgttgcaaataacggtaaacaggcaaagtacgttcactgcgtaaacgcaaaaaataagggctgataatctgcacaacatcatatccccgaaaacccggcaaatgacgcaatatacggagaaggcaacagataccatcacgcaaactatccgtcggccggtcaagagctatatcacgcggatagttcctccaaccacaaccatcagaagcaacacagacatcgtgccccaatgcccgaagcccttccgcaagattccaatgcagcccgctaaactctccaagtaacaatatcttcatataacaaaacgaatataaacattaatggcaggacaaaccaaacgatacttccaagaatactttttatagggcaaaggtactaatccctcttgtttcaggatagctaattgccggttcatctcatttatactacatttattccgccacatctgacggatatagtcgataacaagaaaatggattcgtctattcaatgcctccaaacgctcaacagaggcgtcagactgacaagcctgactaaacgctttcaaccgaaaaagcatttctttaaaatcagagaccctcctccgacgttcagcttcagcaatcattctcgttaaagaagaagatgaacagtaataaccatacactttataagaagtcaccaacatttttcgggcgaagaagtaagctttggcaacaaactcttcatcttcaaaaaggcttgtcttactaaaataaagagaagacgtctccaataaacttcgacggaagaaatgcgcccaaacaactcccgtaaaattattcaatgccatgaagtgggcactggatgagtattctgcataagacggcagttgattggtcggattctgcttctccaacgaagaggcactggtaaactccttaaaaccaaacctcagaatatcaggagagtatagtttcaacaaaggtaaacaagaacgaagtgtattcggtactaaaatatcatcagcatctacaaaaaaaagatattcaccatgcgcttgttgcattccacgattacgtgctccccccgtagtctgactctcatcgtctgctacaatgatttcataactcccctcttccattccctgttcacggatagaagtaatacagcgttgcagcaataccgggtctgctgtaccataaaaaggaataattatactgataaaaggagtcatgtcgcaaatatacagaaaatcctcccccagcctcgcagccaaagaaggattttcaagagaaagacactaaaaaagttattcaatcggtattcctttatagaagtccaatatctttgtacggaacagatattcatatttggcctgcaactcatcagactgggctttcatcaaattctgtttcgcttcattatactctacggcattagctttgccattatcatacttctcactcatcagcttgaaagattccatactggcattggctgccgtactactactggtatacttgctttcggaagccagtgcagtgtaccaggcttgctgaatttctttatagagcgttttcttggtattatccagttgcagagaataattctcctgctgtaaacgcgctgtgcgcacacggttacgagtagtaaagcgattaaagagaggaacactcagactaaatcctacatacttactgaaattatcccgcatctgatcaccaaaattacggtcaatggtagaatagtaattagttccaagactaccactaaaactcaattgcggatagaaagcactctgagcaatacggatgttgtgtttgctaccctccagacgatattgtgcagcctgaatggcagctttagtcgacaaagctgtctgatagacctcatccggaggagtaaggggttccaggtcaagcttcactacaggagcggccaaactgaatccttccggagtttccaactcaataagctgactaagatcaagcaatgctaaccgaaaattattatcagtctgcacagcactcatctcatcctgggcaacacgggctttcgcctcagcaacctccgcaggagacgctttacccaattccgcaagacgagatatacgggcatattgctctttgctcaactctacctggccaagagaaacctgatgtaactcttgattgaacagtacctgcaaataagcagaagcaatatttatagaaatatcttctttagctttttccaaatccgccatagcagctttaaggttcagtttggccaaagcatactgattaggaatctgtaaaccggtgaatataggaacattggtagacaaagacatattagtactgtggctactcacactaatgtacttttgctcatctcctatacgcacatccgtacgtccccagttccaactttgccctgcactaccgttcaggttcggcagacgcgcccatttggcagtattcacacttacggcactttgttttgcctcattagcactctgacggatactgatattatggtctatagcgtagtcgatgcattggcgcaatgtccagccctcctgtgcctgcaccgagacagcaaagacagccatgcatcctattattaagttcttcttcataatctgttattattgaattatacaaggttacttcaccgacatttatttatccttcttctctgcaccgcgcactttggctttgccgtccacaccgtctttgataacaatcttgataccgtcactcatacccactttcacctctttacgctcaaacttctgggcaggcacactatccgtcattacatatacaaatgtgctgtctccactgaactcaatagtactttcaggtaaagtaagtgccttttgtgcacgttccagtacaatttccgcattagcagaataccccgaacgaatcatcaccgtatcgggcacctgtatagctgcctttatctcaaattgattggcaccgttttcttctacccccttcggcgagatatattccagtgtagcgtcaaatgaaagattctgcaaagcaccaattgtcaacttcacaggcataccttcatgaacacgaccgacttccgtttcatcaattttacctctgaaaatcaaatcattcatattggcaaccgtagcgattgtcgtaccatcattgaacgtgttactcataatcaccgagttaccggcttttaccggtacatccagtatcaaaccatcaattgtggaacggatcaacgtacttgagaaagaagcactgctctttgtaataccttccttcacaatttccaggttatccttagcagtctgcaactcttcacgcacctgctttacacttacctcggctttttcatattcttcacgactgatcagcttgtcttcaaacaacttctctatgcgggcaaagtccgtttcgccctgtttcgcattaagttccgccagacgcacacgactctcggcagagttcaacgtacctagttcgggaatcactttcaccttagcaatcacttctcccttgcgtatagtctgtcccgcttctttatacaactcgtcaatgatacccgatatctggggtttaatgagaatctcgtccctcggttctacctttccggttgccacagtcgttttttccaggtcggccactgtcggagttactgtatcatacaccgtaatcttgggtttagacttctggtaaaggaatacaaacgtgaagatgaaaatggcagctacaactaccaataacgcgattttcagatactttttcatactattattatattattgtttctttatttttatattaggaaattaaggagttatcgctcctcttatcattcatccctgatagcctcaataggtttaattgccatggcacgataggccggagccaaacctgcaagcactcctaaagcaatcaacagcgcacaggtaccgatagccaggccaaatgaaacctgataatgagtagtgatatgccccggatcattggcggcagcctccaatacctgcaataccaatacagcaaaagagatacctgccatacccgcaatagtagtcaacaccatactttcagaaagaatctgctgcaagatatccctcggacgtgctccgatggcgcggcgaatgccaatttccgtggtacgctcacgcactgtcaccatcataatgttcgatacgccaatagctccggcaaacaaggtacccaaacctaccatccagatcaatattcggactcccgtcatcagattatccaccatagagaacatggcctctgcattcagcatcatcactgcctgcttatcatccggagagatgtaatgagccgcctttactatgtgctccaccttatcctgaatatccgtcaccttgacaccgggcttcacggtgaaacatgccacatgtatccggttgcccagattataggcttgtttcatggttgtgtaaggcaatgttattgcttccgaagcctgtccctgaatattcatgttgccctcggacgagcacatacccaccacctgatagtaaataccgtctacccggatatactttccacaagggtcttctcccgggtgaaacaaactttcatacacacgtttacctattgtgcagactttacgtgcttccttaatatccacatcgttgatgaagcgtccatacgccatctcctggtgctctatatgctcatattcgggatacaatccctttacgctacattcatatttcttatctccatgcactgccgttcttccccaataggcgatagaaggagtgatgatatcaatttccgccaccccattgcgcagacgctcaatatcagagagttccagattccaccaacgtcctttccggaaacctttatacgcctctcccgtcttctgcgaaaccaggaaagccgaattcgtggcaaagccttcgaactgggagctcatagcctgctgcatcccctgcccgccaccgataagcgccaccagcatgaagataccccagaatacaccgaatgccgtcagcaagcttcgcgtcttgtttcttgtaatcgtgatgaggatttcctcacaagagtctatatctattctcatgttaatagtgattaatgtttagtgattagtgattcatactatagccactaatccgctctcaatgcttctatcggactgatgcttacagccttctttgccgggaagaaaccggccagcgttcccgctataatcaaggtcagcgtagcctgaatggcgacactcaaatctacagtcggattcgagaacatggtttgctggaacatacccgcatccatagtctgattaccgaaagccgagttcatccattccgtaacggcaatgccggccaccatccctatatacccgaacaaagtagtgatagcaacgctctccacaataatcagccaaaggatagataatggtttcgccccaagagccttacggataccgaattcacgcgtacgctctttcaccgtaatcaacatgatgtttgaaacacctacaattccactcagcaaggtgaaaataccaatcacccagatagctgtacgaagcatccccatggcgttttgtgtccgcatataatcggtaaagcggttccatatccagatggcactgttgtcctgaggatcaaaacgacgactggcaccaattaccctgcgatagttggcttcaaagatctcgttactttctattgtttccagatttttagtagtgaaaataatattattcagctgttcgcctttattatagatagtctgcaaagtagaaaaaggaatataggcctcactggcttcgcggtctccctggtcattataaatacctaccacctgatatgctactccacttgcattgacaaactgcccgataggttcggtatgagttttgccaaatagaatatcggcagtctttttatgtataacgatcaccttgcggcgttctttcaaatcattctgattaacaaaacgcccgtcagcagttttcaccgtctctacctccgtatagttggggtgtactcccatcagggagatattcacatactcctgcccaaaactgacgtttacattgctctgccgcacggtagcaccggcactgattacataatccggaaaatacttttcagtagcctccaggtcattattctccaaacggacacgacgtccctccttcaatcccgcataaggcttggaagtccatcccggaaaaatgcggatagagttcaatgcacgttctgaggacgattgctcgaaggcgtggatgataccgtttccggcacccagcaacacgataagcataaagatgccccatgccacggcaaaccctgtaaggaacgtacgcaacttattccgcttaatggttccgtatatttcttgccaaatatcaaacatatattcatttactatttgacaatttacaatttacaatttgccttccggaatgttggcgaagcttcaattgtacgttgtaaattgtacattgtacattcttttatttcataaatccgtcttttccgaatggagaagcatcatgatcacgattctcttcgatgctgccgataataccatccttgatatggattatcttatctgtctgattggctacaccgctttcgtgggtaaccactatgatagtcatccccgtactgtgcaaatctttaagaatctgcattacttccacggaagtcttactatcaagagcaccggtaggttcatcggccaggataatctgaggctgagtgataagggcacgggcgatagcaacacgctgtttctgtccaccggacatttcattcggcatgtggtgcgcccaatccttcaatcccaagcgatccagatattccagtgccatggcgttacgcttgcggcgacttactccctgatagaaaagcggaagcgccacattctctactgcatttttaaaggaaatcaagttaaacgactgaaagatgaacccgatcatacggttccggtattcagccgctttagtctcactgaggtttttgatcagtgtaccattcagataatactcaccggtatcatagttatccaaaatacccaatatattaagtaaggtggatttaccggaacccgaagctcccatgatggaaacaaactcaccccgcttgatatcgaggttgatgcctttgagcacatgcaagggtgctccgttgttgtaggtcttgttaatgtctttcagttgtatcacgtatacctctgttttagtctgttttcttattaattttcactattagacgcagctatgttacgaaaagttgcaaagagggtgaactttttttcaaaaagattttgaagtgtcgtttttctttgtgtaatttgtaaccataatactaattaactaaccctttaaacaaaacattaatatcatgaattcaagcatggaaaaaccctacgtagtaggtattgacataggcggaacaaacaccgtctttggtattgtggatgcacgcggaactattattgcaagcggttccatcaaaaccggcgctcacgatcaagcagatgattatgtagatgcagtctgcaagaatctgttgcctttgattatcgctaatggcggtgtagataaaatcaaaggtatcggtatcggtgctcccaatggtaactactacagcggtactatcgaatttgcccccaacttgccgtggaaaggtgtaatacctttggcagctatgttcgaggagcgcttgggtatacctactgcattgactaacgacgctaacgccgcagctatcggtgaaatgacttatggtgctgcacgtggtatgaaagattttatcatgattactctgggtacaggtgtaggtagcggtatcgttatcaacggtcagatggtttatggccacgacggttttgccggagaattgggtcacgttatcatacgccgcgaaaatggtcgtctttgcggatgcggacgtcacggctgtctggaaacttactgctcggctaccggtgtagcacgtacagcccgcgaattcttgactgcacgtaccgaaccaagtttgcttcgctctatccctgctgagaatatcacttcaaaggacgtatacgatgcagcagttcaaggtgacaaactggcacaagatattttcgacttcacaggcaacattctgggtgaagctattgctgatgctatcgctttctcaagccccgaagctattatcctgtttggcggattggccaaatccggagattatatcttcaaacccatccagaaagctatcgatgacaatgtgctgaacatctataaaggtaaagccaaattgttgatgtctgagttgaaggactctgatgcagctgttttaggtgccagtgcactgggctgggaactgagagacttgaaataaaaagtccatcataattttaagtgaaatcctccttttaccggtaaaacggggaagggggattttttatttcaaaaatatattttgaatgagcaactgacgtacgctcctaaaataccaaaaccgtatcgcgcttttgcaattccaattccagcgcctgcccaaatgtagcagatacttgctccgtaccatctccactcacaggtacctctgaccgaagaaagtacggccttgatacggagcaagtgcattccgggtgtaacggagacaggtcataatacaatgaagaagatcaaagagttaactacgcaaaatgacgcaaatgaacgcaaaaatcacaggaagcgggttgaagagatttattttccatatatttgcgcagtgacagaaacaagtaattaaaaacacgatatcatgggaattatcaaccaaggcattctcggaggtttctccggtaaagtgggaccgatagtagggttccgctggaaatcaaactactatatacgcgcacgggctgccaaagtcagcaatccgcgtacaccgaagcaacaggaacaacgtggcaaattcgccacggcattcagttttctgaaagctataaaacctttcatacgtattggttacaaggaatttacacaggataaatccgccttcaattccgctatgtcctacactctgaaaagagccgtgactggcagtggaaaagaaatcaaaatagactttgaccgggcattggtttctatgggaaccctaatgccgatatttgaaggtacagctacgcaaaacggaaataagatgtacttcaactggcaggacaatagcggtatggggaatgcagaagatacagatattgctatgttactggtatacaacaaaaacaaagaaacggccgtttatgatacgaaaactgcactgcgctcttcccaacacgctgaactacaacttccttccgactggcaagacgatgagctaatagcttatctcagtttttgcagtgctgatggaaatactatagccaatagcattcgactgtcggtttctgtaattgacacaccggaaaatgagatagaaatactaacagaaccaattcctaaaaactataaaaatcctacctccatcaagaaaaaagggactcagattcagataaaacaaaattcatcatacgctccccccaaggacattcggacatggaagttcaagccaccacaatggaccgatatttcaccccaggctccgctacccttaattccctgcacacaaagagccaatatcctgtcaacaaaaagttaactccttgccgacaaggtattaacttcctgttgatagtttttacagtttacaagacccccgcgtcagtatcgctattctgcatttttttattattactcttgtaatcgcgtccgaagttgatgttccatgacaacgtaacacaaatcatgcgggcaacatcatcgatgtgatactgatagctgtatcctgcatatttgttccagtcctcctcattgcgtttgtaatccttctggaaaggattgaacatacgcagtccgacattcaaccgtttccaacgatattgaaggtcaattgcatgtgcctcttcaccggtagccagaacttcgccaaagaaataatcactattatgctggaattcaacagaagctgtgaagtttttatacataaaggtagcagctacatcccaaccgatgctgtgctgtgtatggcgaaaatcaataccgttactccaatatttacgactttcgatgcttccactcagttgcaacacattccaaagcatacctacacgtccatccagacctacagtccagtcctggaaactggaatgattagcgtaactatggacaaatctatcatcctcacgataaatatgaggcatgatggccttatcacggtagttatactggttgcgcaatccaatatcccatttgcccttactgtaattcaaacggaaagtagaacggtaataagaataaggtttcaggttcgggttaccacgttccgactgcaaagaatcggtcagctgctctacagcacttaactgcgagagcgaaggattcattgtattgacatttccattcagtgagatgctccactgatcgttgaaggcatacgtcaggttcagacgcgggttcaaagaataggtttcataatcttcctgccctatctgctgaaaccatgagcgggtgacacccattccgagacgataacccagtttaccccatttaccattatactgtgcgtaagcataagtatcagcctgtttcatctgcgaactgtattgcagcgtaccattataatcattatccgtatatccctgagtatgacgtacgcctgcactcaattttcctccatctttaaaagctttctcatagataccttcaccgatcaacgaatattttttaccgcgtatccccgaatagtaatctactaccggctctccggacaacaattcggtatagctgctacgattcttggtattaatatatgtacctacgacattgagagccaggaattgcttatgcttcaggtttttctgaaaataaagatctagataaggactgaggttgcggtcatgattccactcttcacgatcggttacggaattgggaaattcttcggtatacagtttgcctttcattcgtaaatcaggatcattatagtgagaaaagcccacggtagcgttcagcatatacttgtcagtctcttgcagattataggttacagcaccccattgttgcaagttcttctttttgtttgcctcagcatactggctgcgatggtactgactaccatcttcaaaagtgaacgtttcattcttatcgaaccatatctcgttgaaatattgcaggcggttaccgtagtaaaagctaatctccgattgtttgaaatttacttttcccgtcaaattatgattgccaaagccactcttcaggctttgcataccattgtaaccgaaagagcctcccacttcataacggcgaacgatgtagtttatcaccgcacctgcatcgccatagcgcagacctggatcttcttgaaactcaacacgtataacctcttcaggcaacagggcagtgacttcttcttttgtagcttttcgtccattgatacagagttgtacactgctaccatcggtcatgcctacactgccatccatactattgacacgaagccggggcaacatcagatggcgcaacatgtccacaccattgtttgatgcactaatttgttttttactgggaaatatcaatttctgatctgcccgactcactctgctggaagcggtaacagttacttcacccaactcttgcgaagcgtctgccaaagttagcgtacctacatcagcagtacgttcaaagccttggagagaaagatacaacgattgataaccgatgctggaaatcgccagccgatagtctccggcaacgattttctgaagtttgaattcacccttttcaccagtagtagttccggttacaaaggcagaatctacggtttgcaacactacgttagcataaggaagcggttgctgcgcttcatccaccagttttccactgatattttgtgccataaggctgatgcatgcagttaagcaaagcattgacaagataatccttttcatttttaatatgtaatatgtagtagtttcatcatgaatcgtttacttaaatcaaataaaaagaggaaactccattgaagtttcctctttttatctcgaaattagagtatagctgattagccattaactcttttttctttaattcttgctttcttaccggtaagagcacgcagatagtacaatttagcgcgacgaaccttacctaccttgttcacttcgatgctgtcgatagccggtgattcgattgggaaaatacgttctacacctacggtaccagacattttgcgtacagtgaaacgctttttgtctccatgaccggaaatcttgataacaacaccacgatacagctgtacacgttctttgttaccttcgatgatacgatatgctactgtaacagtgtcacctgctttgaagctcgggtgttgtttaccggtagcaaatgcttcttctgcaattttaattaaatccattgttattattcttaaattgtttgatcgttacaacgcaacataccaggcttctctcgtaggtcctgacagcgattgcgcgaaagcggtgcaaaggaacgaattattcggcagatacacaaataattcgctcgttttttgcttagcgacgatcgcctgaagaacggctggaactaccggagctgctgcttcttgttgaagaagaaccgctgctgcgtgtactgcttccggaagaactccgtacactagaagaactgctttccttacgtccggtactcggtgtagtactgctgctacggcgggaagagcttgtattgctcttcgtttcactactgctattggtacgcgtactgccactgttagtacgagagctgccactattacgtgaactactattattggtacgcgagctattattagtgtcagtagcactactcttcgtactactgttggtacgacgtgaactgctgctggtattagtagctgcattgctgttcgtactttccctgcgggtagtgcttggagtggtagtgcgattactacttgaactactgcgacgggtagtgtacacatcatctctcgacggcgcacggtcagagccgggacgtacagttacagagccaaaatccgaacggcggtgtgttgtataggattttgtatcacgaattcgatacgaaccattatagtatggatgtttgtagcgtccgcgataatagctcacattattatgatgcgtgcgatagtgccctcctacatacgtacggtagtgatacggacgagggaaatagaaatgattgtggttggtatacgtgatataaacacggaagtaccaacggtttccactggtatagatggggcggtaaaaatactccgcctgcataaagcgggcatactgtcggctactaagcacccagcggagatcgtcattacgtacatccagatagtcataatatcggttgagtgcccactcattaccatatagcacatcgtccattacatagcgtacaccggaaatgaagtcataattgatttcatatacatcattgtattgttcggtactcaggttcagctcataagccattttatctgtgaggaaacgagtctccttacgtactttgctattactcatagcattcgtgcctgcgctgcaaacagcagtactcaaagtggcaagcaggataaataatattcgtttcatgatagcgttttttacttagtttatgaattgtctattctttgttggaaacaaaaataggggaagattatcccctattcatttgtttctctctattcttatatagggatttccctaatctatttaggactttggggattttgccaatatgatgccatcctctttcaaaaggatgagatgtttcttatagaggtcgcctacacctttcttgaaagttttcttgctaacgccaaaagtggcataaatgtcatctgccggacttttatcattcagagatatctgtccgccattatcctttatatattgcaacagggttttcgagaagtcatccactttttcaaagcccggcttctgaagtatcaagtctatcttaccatcctcacgtacttgcttgatgaaagctttcacctgatcgccggtatgcaaggattggaatatctcgctatcatacaacaagccaccatacttattctcaatgatcgccttgaagcctaaatccgttttttgccagatgaggatattcacctcatctccggcttcataaggcgctgcctctttagaaagatagcggtctactttggccgaagctacgatacggtagctttcatcatccagatgagcatggataacgtatttctttcctacctgcatcttcatcttctgttcacggaaaggcacgaaaaggtctttcatcaatccccagtttaagaatgctccatactcatttacccatgctacttccaaacaggcaaattcacctacctgtaccaacggtgtcaatgttgtggctacaaggcgttcctcgttatccagatatataaatacattcaattcgtctcccggctggcaaccttcgggcacataacgcagaggaagcaggatttctccatcttcaccaccatccagatacataccgaactccacttccttgactacctgcaagatattgaatttacctaattcgatgctcataatttctttcgtttggggcaaagataatgcaaaccgaaggcagtacaaaataagcttgattatttttaatgctaagatgcagcttatcttcgcttttaagcaaagattaagcataaggcataacttttcaatctaagccataacttttttctatgaacaaatctcttggaaaacagttatttttgtatcgggaaactaaagataagaaaaattatattcaccttttaaatacataaaagttatggaatttctaacaaacgaaaaacttacgattgtaggagccgccggaatgattggttctaacatggcacagactgccattatgatgcatttgacacccaatatttgcctgtacgatccgtatggaccgggactggaaggtgtagcagaagagatgcttcactgcggtttcgaaggattgaaccttacgtatacttccgacatcaaagaagcgttgaccggagccaaatacattgtatcttcaggtggtgccgcccgcaaagccggcatgacacgtgaagacctactgaaaggtaatgctgccattgccgaagagttcggtaaaaatgtaaaagcttactgcccggacgtgaaacatgtagtagttatcttcaatcccgccgacataaccggattgatcactctgttgtattccggtctgaaaccttcacaggtaactactctcgcagctctcgacagtacccgtttgcgtagtgaactcgccaagcatttccacatttctcctgataaggtagaaaattgccgtacgtatggcggtcacggagaacagatggctgtttatgcttcaactgccaaagtagatggtaaacctctgttggaaatcatcggcacacctgcccttactgctgaacaatgggctgaaatccaaagcaaggtaaccaaaggtggcgctaacatcatcaatcttcgcggacgctcttctttccaaagcccggcatacgtttccatagaaatgattgctgccgccatgggtggtaaaccattccgttggcctgcaggtacgtatgtacacagtcatggcttcgaccacatcatgatggcaatggaaactgaaatcaccaaagacggtgtacactacaaagagttgaaaggcactccggaagaggaagccaagctgaaagaaagttatgctcacctctgtaaattgcgtgacgaagtgattggaatgggagtacttccggctattaaggattggaaaagcatcaacccgaacattgactaaattatatataagggaatatccccgagaactcctgtttagactttccctcttgcgctcacacaaaccggacgcagggggaattttcttttattttttcagaaatcctttggctgtattaaaaaaactatttatctttgcacccgcaaacgaagaaggtgccatagctcagttggtagagcaaaggactgaaaatccttgtgtccccggttcgattcctggtggcaccactcgtaagcaaagtatcggaatgtagcgcagttggtagcgcactacgttcgggacgtaggggtcgggcgttcgagtcgcctcattccgacacaaaaaaggtctgattctcaaaaggagttagaccttttttgttacattctcaatcccccaaacaacattattctaatccgattctattatgcttgacatcatactgatcatattaggaagtctatgcctcatagtaggcttattgggatgtatcctccctataattcccggaccgcccatttcatacgccggtttgttattactccatattacagataaggcgcaattttctacatcgcaattactgatttggttatttctggtagtgatagtgcaagtattggactacttcactcccatgattggaagcaaatacagcggaggaagtaaatggggcagttggggctgcctgataggttcaatcgtcggaatcatctttctcggtccgtggggaattgttatcggtccctttggaggagctttcatcggagaactcttgggagacagaagtgcaagggatgccctaaaatcaggtattggagcactgattggttttctggtagggacagtgtttaaggtagtagtttgtggatacttcgtgtggtgtttcgtaaaggcattgatataatttcaccacagagtgacacagagtcccacagagtttaatttgaaatcagaactctgtgggactctgtgtcactctgtggtgattatactattatcgttgtaatgtaattcccattaacccaatcaccacatcattagaaagagtttcaagaacgaggtgggaaagtttcttatcaggattcaagggcatttcaagcaatatggcagcaccaccatccaattcacgggaggcacctggaaagcctaattcttctccaaagttattgctgatctcgcccgttttaagacgcaggcgataaagtgccggagcatgtcggttgaaagccagaccatcttcaaagaaaatatgctcaatgggcgcccagttatcgggattacgcaaagccatcttatcgcaagtaccatctttgtaataaacacggatcagcccattgtcaatatggcactgcatgtgattggtgctacctgccatgagtaaataggcacgggatgcctttcctttgagagagaccgtcaaactatccggataattatcccacaaggatgtgaaagctatatttgggccctcagcaggagtacggaaaggaactcccagcttagtattcaacactcccttctgaacggaagagcgaagtccggaatcatcaatatccaccgtatgcaaaggatggcaccattcaccgataccttgcttgggtatctgcaaagtggtatatggagaccgaggtgaaagatactcattacggaatatatctgtaacggcagaattgaattgttcatccatcacaaccggttcacacttagaagaattgactttagcgaaggcggagaactgagtagaatcatccttatctgcggacagcggattatctacaggaacccaccatttcatatccccttgttgcatcggaacaaaacatacaggagcttcagctgaaacagcttctatctgagactttgtcggactaccaagcacttccccgccccattcaatgttaatttccactttctcatccgaggaagcagggacaacgacggaaagtaccggacggctgatggagttctctaccaatgtccatgttgcaggctttccattgactgtaagcttcgccacttccgagtgctgagccggaaactgaagttccaatgtacgtaccgcaggtaatcggtggatgattgcataggatgttgcagtttcattagtatgcttaaagtcaaaatcaatatccggagtatgcagggatgcaaaaggccaggaggagggtaagccgggtttcaccagcaggcgtccgttcatggcatcaggaaggataccatagagtccttgtatcaatacacgggaagctacacctataggatccccgaaatcacggtaacactctccacgagcagcatcataaaaactgatttgcccgaagttaccggggctttcacccagatacatgccatcgaggacagaactcttgagcagatgaaaacctgcatccgcacgtcctgcctggaaataagcaagagcagtatgcatcacttcggcaaaagcaacattgttgatactccaggaataaggcaaccagttcgtagtggagatagtagcataaccttcatctttcaaaccatcgccatgaacggggatatgcggtatttctcgatccacataactggtggcaagataagcttggaaaggatcagcgatgtcgctatccaatgcatgataaatagtccatacaccgggactggtatgcagacgtttatgccccatgaaatcctgaaactcagcccaatgtccacgttcgggcatccaaaggcgggcattcagagctttcagtattctgtcagcttcttcacgatagggtgcagggtcttctccaatcttctcggcaatcatagctgcgaggcgattggaacgatagttataggcagaagaatgagtgaccgcaccactattataataaagggcatcacttgcccagatgcaggcataggcatcataaagtccgtcattatcgggatcatagtttcgtttttcccaggcaaggtgacgggtcaggacaggccacatacggcgggcgtattccaaatcaccggtccagttgaaatgccacaagagttcatcaatataacaaagattcatgtcataatgatgcatctgatcgttccgacgggggttacggcagatataaccgttactatattggggtgttctccacttcttttcggaacgtgccaaagcaagagttgaatcctgtgcagggtgtggaatcgtgttcggcacttctgtcacctgactggcggcataagcattgaagtgcgtacgggcacggtcgtgccaacctaaggcatcaccggtataagcagcacgccagccactgagaggcatacgccagccaatagcaccatgcaaccagacttcaccatcccaaataccatcggcagctacggcaagggcaccacccagagtattaaagtatggatcgggggttgtgatcctaatacgtgaggtaagatcggcacgggcttgttcagacttattataaagggcaatgccttcttcctgtgaaggtactaccaaggaatagtcacgtacaagtacataaacatcctgccggtcgaaaagggagatacccaatgattgtaattgttgaggttgctcgggtgcatcaaaacaaccgggaggatcggcccccatatcaccgttacgactcaatctgttcaggcggatttcactcaacatagggcgcaaaaccgcgcctacaggcatatttacgggggtaatcttccaaatggcagcatcctcatccggcaaagcaagagcagagatttgcagctcagcatctgttccccaggaggggtgcttcagacgataggaacgccgtccgggagtgtaacgagactcacaccaagcggtttcttccaatggagtcactgaactatcagccagtacgagatggaaatgtatattcttactgttgcgcttttcgtagacagcaaaaataggacggtcactcgtttccaggcggaaagcggtatggctgccataaagggcacgagtatagcggttctttccattgacacttacaaaatcttcaccgtccgggcgatattgcagggtacgggcagcaccccgcttatgatcattgtaagaggtggattcgatgcggtcgccggcactttgcggtttattaccggtggtatattgcgcataggcgaaagctggcagcaaagagatgaggatataaaaaaatagttgtttcattacttttcggttatgaatataattttaggcgcggattacacggattcttttcctgtaatatagtgcgatagcgcagccattaatccgtgtaatccgcgtaatccgcgcctaaatcattatcagcatttagttcattactgtaccgttacggcatcggtttcaaaccttcccaacggacatcccatgttccgtcctgcgggaagcccgggttcttcacctggcagccatcccaaccggcacacattaatgctacagcagtcagcaagcctccattaccgggcaggtaacagcgcagacgaccatcctggtagttatgtccgttctgcaaatacgtattcgtgcgcttatccatcagcaaggcaccgacagctttttccggctcgcccagacgagtggcattcatggcagtcatcggataatcccatccccaggtcttaccccagttccagttgtcccacacccagtgcagggtattcttcatgtagtcgtcacgaatgagtttattcatcggaagaatacctacagaccccaatacagccatgtgatcgctggtaaaacgaatatctttgtatgtatcaacagcatcttcagaagcaaggtaaagatgatcctcattataggcaagcggagaaagtttatcaatcatctcatcccactccagattacgcttctctccggcacgctcgcgccatttctgcgcagtctgcatggcaaagtgccagtaagacaattcgaaaggcgggttgatggtagtagctgcacgcagcgtctcttgtgcaggaatagctcccttcagaatgaaacgtccgtgaaactcatcataagttgcaaaagcatacatgaactcggcagtttcctgcaccagacgattgtatttcttaatcacttcatccgaaggattggcacggtagacaagttctgccagatagataaagtgcggttgttgccagatcaggaaagaacctacattcgagggagcttccgtaccactgggatcggtcattttcatccagcgtacgccggggaacccttgacgacgtgctatttcacgagcaacaggctctacagtttcgtaccagcccagtgtacggtccagcagattggcatgtccccaaagaggttgccatgcctgatgccaccaaatcatttcgagatggaatttaccaaaccaggagttataagtcaaacctgtttcctgcggaggtacacttccagccgactggatagcaagcagatattgactcaacaacacgcgacgttccaattctttggcacgcggatccgtgcaatgagagaagtcaacggcagcaccattcttccagaaatccgtccagtatgtagcactggcggcagcagtttcggtgaaagcgggcaatgctttgtcatcggcatagacagcaggttcactttcgaatacggttccctgaaaattcggtgtaaacaggcaggaaaaggccagcatatcttcttcaggagtcagtacgaaatagttcttcgacttctcagccagattcgccttgccttcccaacgaagggttacgtaataagttgtttcgtcaagtacacgcttcaacaaagcactttgagcatcctggcgaacgatagttgtggaatgtttgtcgttcgcattccaattgcaggcatcatcggcatgtccgcctgtaggataaggaaaacgcaaattaacccccgcatgcgcacgactggtaacacaagcagaaatcatatcctggttaggatggcagactgtctgcacatcgaaagcattgccattcaacatgaagtggctggtgatttcacctttccacatattcagtgtctgctgaatctcagtaatatcagaagctttcactccctcgcccagttcgaggcctataatgcccagatgcaggcgatgcggattcacacgaaaccaatcggaagattctttctgacggcccggttccttgaactggcaggcatagagttcttcgtgaccacgaccgaagtcaaatgatttcagtgtttcctcatgcttatatcctttaggattggcaaatgaatgccaaccccactggctctgtgtgcccaagggtacacctttactatacatggccggaaatgtctgcaaaccggtagcatctaccgtgaacgcaaattcaccgttgccgacactaagcgaagccaacgaatcgaatgaggatacttggggattgttacgggccaccaatgcttcacggtctatcggagcttgtttctccgaaccacaagccgtcagcacgaaagcggcgagaagggaatgaaatacttttttcatggtattctttataacagatagttagattaatagctgggacaaaaatagcagttcccggtaaagcaggcggtgcagggtttgacggaaatgataaggaaaatgataatttaccagcgtagcgctggagcaaggttctccttcggcgtgcaagtaatctttcagacacggatgacacggatgacgcggattcttttttccttcggtgtgatatgccggtatgtatagcgcagctttaaaaatccgcgtcatccgtgtcatccgcgtctaaaagattaaagtccgcgttcgtccgccttatccgcgtagtccgcgtacccattccctcgccggtaaattatcatttatctgaaatcaaacatcaaattcaatctcaatccctcatcccccttcttgatacggattattcccggttggctctgtggtccgtgctgactaatgggtttgaagcaacggatagctggtatatcgagcaggaaggaaatatctccggcagggaagtcgggcatggtgttcaggccatcctgacgtccgtgaggttcttcgggggtaaatactcgcaggaatatcccgtcactcgccgcataaaccgtaaatggagcggtagaactttgcaaagttgcccagtaaagattagcatgatagcccttgaactccggataaaccagacgttcggtactttcaccggtgattgtattattataatctttctgccaaacaccataatttgcccccggaatacgattcttccatacacgatatggaccgcgtcccatccaacgcataccggaacactcggactcaggataagagaaagtaaggccaagattcagcacttccgtgtcagtgaaagcatcgtcgaagccaccaccaccggaagctcggttcagcaacacagcatccatcgagagcaatccgtccggcgtcagacgccaaacaatagagtccgccgcaccacgataacgggcacaaagaaccgcatctccattttccgtacgagcagacagatctgccaacaccatcttcatcccaacagtaacagggccatctttcagcgggatgattcgtccgtcagcattcctcgtcacagaagtgatagtggcatcactctttcggaaagagacagtgacggcagaagaacgcaacgtaatcagagtatctgtttcctcaacacggcaattacttgcagccgcactttgcgaaccggacggatgagcatctgccctcttcggctgtaactcacctttcagatagtctttcgcgtaatgtatcgggaatgtacgtgtacagacactctcgccatctgctccataagcttcaagttccagaatatctccgttgaagaaattatccggcagattcatgcgtgcaaaccccgtttctccgggaaccaatgacggtaactgcaccattccactgtccagcacctgacgccatgcccgtgcacctccgtcagctactgtcacaacttccccttctccatcaccattcagtggtgacgtgcaatgaagcacgcgccagcgcatggagcatgcacccaggtttgtaaacagatatctgttcgatacccggaaatccccacggaacgaaggagtaatcatcaacggttctatatgtattggcgaccagacttcacgaactgaataataactgccctctttttcccggaaaggccccagaataccatccggtgcattataatcttcactgtccagtgccccgccgcgatccgaacgacgcaccgcctcatcactatatgcccacatgaaacctccggcaaagagcggatgagcggtgtagcgtgcccagaaatcttccagtccggcaccatgtccctggtcgtactggccgtgcatgaactcggcaggcataaagactttatagccattggtgaaacgggccactcctgtgagataagcgggatagtgatgggtatccagttcgtcaaagtccgcccagggatggatgacatgacgtttctggggatcgtatgtacggaacaggctgtcgacggcagtattccatccgccttcgttgccattgctccacaacacgatacacggatggtttacatcgcgcgtcagcatttcgcggacaagccgggtacccgtcggagtatcgtaagcattctgccagcctgccagttcatcaatataaagcaagcccaacgagtcgcaggcatccaggaaatgttcatcaggcggataatgggaacggacggcgttcatattcatttctttgatgagcttcacgtcctgtatgctaagttctttattcgtggttcgtccaccatcgggatggaaagagtggcgattgattcccttcataaccagcttcgtaccgttcaggtagagcccgtcgcggggacggaaatcaatggtgcggaaaccgatgcgggtatccacaaagtgacgtggattcgtattcttatcacacaaatacactctaagttgataaaggttgggagattccggagtccacgggcaaatatcttcccaacggcttgtggagtgcaacgtagatgcgccttccttaaattgaacaaatacgactgtcgtttcttcgaacaatgtatcctttttctgcaaaggttctacctctattcccaggtacccttcctcagtaacccctttcaaatacacatccagtttcagtgtgccatccgcctgcgcgtccacagccagacgctctatatgtgttgccggttttgcttccagccataccgggcggtatattccaccgaacagccaccagtccgctttacgttcggcgacattcactgtacggttgtcggaatgtttcttcacccgtacttctatttggttggaacttccgtatttcagcaattccgttacgtcataagagaagcgatagaaaccgccctgatgcaccggtcccgccgattgcccgttgactaaaacctcggtatcggtcattacaccgtcaaaccagagacgtatgttctgtccctgccagttgcggggtacgcggaaagaacgtttgtatgtgccttcttccatcgaagggttcttcacgcccggctttttataccagcggccgtaggtgtattcgccgaagccttgcaattcccattgcgaggggacttctattttactccagcgtccactgttccggccttcggagacgcggaattgccaggtcaccgtactgcccagcccggtgccggaaagatattggcgttctgtttcctgggcttgtacaacccaagtggtcaataagaaaaggaggattccgagaaagtgctttctgctcatagtatttggctttattattcgattttacaaagaaagacattctcaggcaaacaggaaataagcagaatgattttctggctgtacaaaatgacaggaagagaacgactaaccatttagactcttgtgcccaccaataaaaaatataacttagttttttccctacgtccttacttcatccactttaccagtacttgaattactcttattgtaaagtataaccaagttatatgggggtatgtcacactgataagtataaccactctcgttgaatgttttagtagtggtataataattcgtctgtgcatgcaaatatgacacatagaataagatacaaatagaaacaattaaagttcttattagcaaattcatacgcacagacgattattaattaaatgacttactatttaggttcttgcgcccaccaataaaagatataattcaatttctttcccacggtagtcggagtataccaaatattttttttgatttcggtttcaatcttgcgataaacagaaacaggaatggtggcaaaaggatcggatttgtgaaattcaaagcttacttcatccactttaccagtacttgaatttatgtacataattatattgaaatcatgtccttttatcctttgcttctcactggctgaaaatgcggaattaacaatagaaaaacgttttgaacgtgtccaagtgtcgctttcaagtaatttaataccatcaccagcctcatcttgcacaaaatttttgcctgtatccttataaatagaatgaacatagatccatttattactcttattgtaaagtgtaaccaagttatatgggggtatgtcacactgataagtatagccactctcgttgaatgttttagtagtggtataataattcgtctgtgcatgcaaatatgccacatagaataaaatacagatagaaacaattaaagttttcataagcaaatttatatgtacagacgaattatttaaactaaccactacttaggctcttgcgcccaccaataaaagatataattcaatttctttcccacggtagtcggagtgtaccagatattttcctttatttcggtttcaatcctacgataaacagaaacgggaatagtggcgtaaggtctaaaatttggaaactcaaagcttacttcatcaactttaccagtacctgaatttatatacattattatagtaaagtcatgcccctttattctctgtttctcactagcagagaatgcggaattgacaatagaaaaacgtttagaacgtgtccaagtgtcactttcaagcagcttaatgccatcaccggcttcatcttgcacaaaacttttacctgtatctttatagaccggataaatatttatccatttattgctcttattataaagtgaaacaaatctagaagcagctacatcgcactgataagtgtaaccgttctcattaaatgtcttggtagtggtataataattcgtctgtgcatgcaaatatgttacacaaaacagcatgctaataataatagttttcacctaattatcgtatatttacaagcgtttcaaagcacttaatttttcctaccactgaagcatctccctctttaattatcctaatagataatttagttgttacaactatactttttgcattcaaccacttttctttattctttagagtaatgccaaaacatttttcttcatttggattcatccaactcatagaacgatatttctttaaagtatctgctttttcatcatattcccacatcaaaaacatcgcgtcatcagaaaaaggactttgcgggctttccctaatgtaaataatactaccatcaaactcattcgtgccaatacgaccattaaatagtccaaatgatttgctgctactttcgttttttacttttataagtaaaaactgtttctcttttaaataagacacatccacctttaattcattttgagataaacacaaagtagaaaatgtgaacgaaattaatatgcaaataatatatttcataatctataatttatttatattcttctattgctattttatatttttgttgatgtaaccacaacccatactctctttcaatgctatatgaatccgtaacatttttaactgtttcaatttcatttgtataggcattaatatcatttaaataatactccggaggcaaagtagtagcaaccataagttctgtatatttaatatattcatccaaactcgttccactagagtgtgaggagttgtattcttctatatgtaatgctcttaaataattcatcaaattatcaggaggagtatcaaaatatcttatactatttaaattttgcaacttagaatcccaatctgtttcactatttacatcgttgcgtatatgatagatttcatgatagatgttagagcaaatattattatcatcccaaaacatgtgtttttcatattctgatttcatttattttgtcggaacaaaggtagaacattatttacagacaaatatgcccttacaaaattgagacgcaagcatcaaattcataactaactatatagcaaccaattagtattttatagacaggaataaatactctttttataataattattactctaaattctatagttcagcatcacttttgtaaaaccataagaaaacacaactctcattagcatacagctattcggttgttttttcacttgcaagctacactaaatgcagatactttgcattacggaaaagtaatgaatttgctcaccacagattaacacagattctcacagagtttaattaattaaaaatcagagaaataaaattctgtggaaatctgtgttaatctgtggtgaattgattcataacccgtacaaaaatgcacaaaacataaccaatagaaatttaactcatattctagatattagctatatacatcggacgcacagcatctatatatcgaacatgtcgcatctatatatcggacatgcagtatctatatatccaataccaccgatatatagatgctaaaagagcgggatgaaagaaaagtgttcagcctttctaatacagatgttcctatatcctcgaaaaacagttctccaaatgccacacttaaacgtatgaaatgccacatctgagtgccttaaataccacacttgaagaagtgcgaagtatggcattccggacgtttaagtgtggcattctggttactgagatgtggcattccggttacttatatatcaaagcccccttaaataaaagttgatgtgatttactctcactactctcacttttgaaataagcagttgataaacaaaatattaagtgtgagtgagagtaaattttgggcgtggggggtaagttccctaccctcacgctcaaaattttattcctacagattaacttgctataacacaataagatattccgcatttggcgtagatgccgtataggcccgtaatccggtatttttagcttttttcccccgcataaacggcggtatgtagccctttccaaggattattctcctaataaatgtatcgtttctgtagagttcatgggggagggaggctatccgcgtaatccctattcatcctgtcaaccacgaggttcatgcagtgtaagaaaaccgaaaaatctgcagtttctccttttacaggaagttaggagtttgctgacaagaagttaacttcctgtcgacaaactcccaacttcttgtcgacaagaaattgggagtctgtaacatattgataatcagcaatgaatttccttgtgtaaaaagagtattcgtgtgcatatattactcacttttacatgaatcggacttgcctgaaattacattgcttgttgtagataagaacaagcaatgtaatcattcattgcattgcttattctggatcataacaccgcttgttttcagatgttattcaataagtattttttcttcctgcagtctttcagttttttccaaacgccctgttcatcggcatttcagctgaaagatacctgaaactactataaggcgggaagtttcagccgtaacgtcgatgaacaggggattccgtgaggcctgaaagaacggaaagagctttttacggaaaaatagtggatgcagagtgatagttcataacaggtacagaaatgagtcaaatggtcaagtaatgctatcttaattctcctccaactggaggaggggaattgagatactctatttacttaatattggaattatcatttagctcataaccgaaaagaaataccaaaaactatccgatatatatcgctggaaaaacaactatacttcgctaaaaagagaggatacacgggagttaagctgccgaaccggcacttttatctctttcctttacgactgttagggaaaaatgtagtatctatttattctttccaccgtggtggaaagaataaacctttgcagaaaaatacgctaatcttccacagaaaggaacttaggagatgccggtctccgttttatcttcttacgtatccacaggtaatatccggtcagcggaagacttgcgcctatcaatgctgcaacgaaagtcagtatccgcgtcagcataccgccccaactgcccacatgcacggagtaaatccagccacggattttgccggagttatccaggtccttatagagagtagtttcggtaatctcgccattacggggattgaacttataacggtctgttccccgttggttaccgaaacgggggacagcaacactggcagaaccgtcggaaacactaatctgcttgtagtctggatttgcctcggccaactgttcatatacctgttgccaattagtataaggagaatacctgtgtgcgccacggccttccctaccctccggtttaccctcccgcttaccgcctttggcagtcgaattggccgccgcgttgccgtgccccatactgggctgcacttccacgccaaaggttttataaaatcctgtcctgtaccactggaaagaccacgtcaatcctgtaagagccatagctagcaagaatacaagtgcatacattccgcccgccacatgcaaatcgtaccaaaaacgacgccaacctttattcgctacaatcttcagactgttcttcaatgccttgcgcgtacgcggccaccagacgactacacctgatatcagtacaaacacgaacatcaacgtactggtgccgacaatcatcttcccccagaagatgccgccatcctgcttcatgctgtccagcaaccaacggtgcatccggaacataaagttgaaaaagggcgcccgttcatacttccccgtaatctcacccgtatactgatccacatacatagatgcacgacgaggtttggaaagcgtgacttggtaagcccgttcaggatcagacgaaatattaacgccggtcactgacacgctatcgggcaaggttgccgccactttagtcatcaattgctccatgggtagcggagcagcctcaacctttttcacaaagtagagctcacgatggcaaagttccatcacctctttctcgaataccagtgctgcacccgaaaagcagatcaacgtaatcagtatcccgaaaggaacggaaagccacaagtgtatattacggaatatctttctcattatgtcaatttatgaagttcgtaaaaaagagcctggccggcacataccagcaggctctttatccctaattataatcaatgaatgttttgcgcttatttagtaggtgtcaaccggcccacaccgctgatctgagtagcttcaatggtaactcccttcgttgcagtgacgctcgacggattgatcttgtagatggcaggataaccctcggttgtcgttacagtcagataaacattgccattttcggtataaggcgcgttgccgaaaccggaaatcaaattagtctcaggcaagccggttacataagtcagcttcttgtcgcctgccttgaagatggccagttgattcgcagtaaaatcttcttcagtcaaagggcggtcatacatcaacatcaggaagtagtcacccgtaatgtgccagcaacggaggaaagattttccgccactttgagcttccagatcacaatagtaatcatcaaagtcttccgtgccgttaggaatacgtactacaccggcaggcaaagtagtctgttggcgcacatcatccatcgtctttgcaaaactgggagagaaaacgtagatatcaccgttgtctgcttcccagattgtctggtaatactgagatttattgcgtccgcaagcatagctgattttatctgtactgatcagtttcttgctggtaagagtctcatcatcgaagatagctacccaacattcattcggatattgcgtccattgcaactctccttttttatagctgctactgtttgagccaccgtcttccttttttatcaggtcttgattacccggtaacacccattcgccattattatacgctgcgccatactggctcagccccatcggaacagctgcgctataaatcttgttgccgtgttgcaaaataccagccagcgtcacaaactcaccatttcccaggaaattctctgagagataggccttattttgagtgtcattggtcttataagtttcggcctctacatccagataagaaagcaggaatgttttaggtaagtaaccgttatcatcggcataccccgtatatccgtcacctgtagaagaagtgatgatatatcccccgtaaataccatagctggtgaaccgcttcactgcatactcgcccgaccgtgccaccatttcataatttgagttcatgacgaatgaacgggtagtaccggcattaccttgattgtaggtcaaaccatacagatattgatctttataaaatatccactgtgacgcaccgtcattcacaaggccattgtttatggcggaaaccgttcctttatccaatgtttcggaagtcagcagaacgttcgtagtatttcccgaagctgtcactgaggatgctatcacatactcacctctaccttcggtgccaccaccaaggctcggctcattgtcagtacatgcagtcagcgccagtccggttattgctgttgcaaaaaatccagtcaaaaagttattcttcttcatcttacttttacctttaattttaatctaaactatataatctatgaatctttaattaccaaaatacacacgcactttcccgtagaatgcccgcccgggcttctgaagactgaagttgtcatacagtttctcgttcgtaaaattgcggcactcaaacgacaaattataccgtccgttgcgcagactataagaaagcgccagattgtgcgagaactgattaggcaccacataatcgttcttattcgatccgatattagatgaataataagtaaagctatgcagatactggttgtcataggaaaccgtcagcgtattacctttcttccaaaggttgcgccaatagaacgtcacatccgaatcggcaaacatatacggcagattgggcatacgctctttataggcaagattggccgcactgctggagatcgaggtcttcatgttgtcacgcacgttcatctgcgtaaagtttcctccaacactcagccatcttccgaaaccatatcgggcggaaacattaaagcctttcgtcaacaccttaccataatttatataagtagcagctgatttacctccactcaggtcggcaatgttacgctgaatatagtcttttgtattacggtatatcaagcctccttccacatatacggagtgtttcccgaatgtccgggtatagctgaggttaaggttcaggttgtcgctattctcaggcttgatgccgatatctcccatttccaggtcttcatcaccgaacatttcttcaatagtaggcagtcgataggctttctcataggacaatttggcctgaaggccgagcaatatgaaataggttccggctgcaccataacccatggaactcacatcgcgagtagtgcgcacatactcactctgattactggatgtagccatcggccctcctacaaactggtggtaatatttgccgaatacggagaagttccagttttcagacggcatcaggcgataggacaggccggaaatattcttgcgtgtttccttggcgatagcctctttttgctcttccttggcaagcagcgaggtgttagaacggtggaaagcattcaatacatgattgaaagtcagcatctgtaccctattgatgcggtagttcacagtcagcgtaccattccaattgttattgtccgcccgtgaatattgataagactgttcaccgggagagttcatcagcgccttctgcccataccaattgtacttgtatgaggcagtatccacattagtggtttcattcttattgtaattgacggtcagtgccacatccagacctttggtgagcaggtcacgcttgctatattccaatgaaggcatcagtgaatgacctttacgatgcttctgaccgtatacgatttcctgacggacaccggtctgtatatccttatacatgtgcgaataggtgaaacccagcaacagacgatccgcccactccttatctacaaaaccaatctttccgataatggcttcgttatggtacgtatcgttgaagcgctttacacgtaccttcttatccctgtcaattctgccggtttcgaaatcttctaccggtgcctctacatgatagtcgttatccgaataattctggaaagcattgatttcataagtaaaaccattcttgaaggtttgtccgaagttgacgtatgatttatgtgtattaaatgagccataagaataggaggcatccagaaaccagcggcgacgtttcttgttagttacaatattgatgaccccaccgatagcatcggtaccgaatcccacaggtaccactcctttatagacctcaatccggtcggcaaagttcacaggaatattgttcagtccgaaagaatttcctacgccttcctgcggtacaccgtcaatgaatactttaacgtgctttccactgaatccatccagcatgagttgcatatccgaacccacaccacccgattcacgaagtttcatacccggtgccttggttaaggcgtcactcagattcttagtagtgttctgtaactctttcgtatcgacagccactgcattaaaggctgatctcttcaaacgggtcacccctgtagaaacaatggtcacttcgtccaactgctgtgtctcgggagtaatcgtgagattctgtttcacccgctcccctgcaatcagcttcacttgtttctccactgtcttatagccgatggcagacacgatcaatgtatagttaccggcgggtgcttttatatggtaaataccttcctgattggtagttccaccataactggtacccttcagatagacagtcgcaaaatcaacgatttccttctcagtagacagtatcttaccggagatcattgctttgtcttgtgaaaagacagataatgaggaaattaacaagacaacgagaacggagagttttattatatttgctttcaatttacaaagagttttatacgattaataaatcgctgcaaaggtctttataaaagggaggcaaaacaatcgctatatgcaggtaaatttctaatcggagtatcagataggagtatacgccgcaatcgctattaataggtatattgcattagcacaaaagaatctcatcatagttctttacaaaaaaaagaggcggcatactcataatgagcatccacctcttcatccactaaccttcatcagcagttctcaacttactgaactaaaccatttagataaacttcaacattggtataatttccatctagcgtataatcagatgcatccaaagcattgtgaggatttaatccatgcttactttcccacacatcaggcataccatccccgtcactgtccttcaatgctttccctactttcagaacaggccatccgcccacatccttctgtgagtcgataataccgtttgtaccgaatgtgccaatccctttctttacctgaagtaaaacttcacgatcataggtatcttgagcaaagctacaccccacagactccagaacccgttgatatgctatggcaggcgtatcctcattaataggctcacatggaaagggagagtcagttagacaggatgcacactcttcacccggagcagggatagcttcgatagagataccggagttcggtccggcactcttattgccgggtatataacattttccaggacgatccgctacggcactatggttatcacatgtcacagcatcatccccctccatcacgttgccgaccacataatagcgcccggtaccatcttccgccacatcaagcagacgatgatgctgtgaagcaggccctggtttataatagttattcaccatattaatctcggcatgatgtccacctccataagctgtcttaaaaccccagttatacaccacgttattccggtaatccacccatttagtaccatccacagaagcaaaacggggattacgacttgcatgatttgccaacagattgtgatggaaagtagccttataccctccccaaataccaccaaagccatgactccctttagtatgtaccgaagtattcagactatgggtaaccaagcaccattgtactgtgagattctcagtcttataaatagaaagacattcgtcaatactccaacttacggagagatggtcaagaattacatttttctgtccataacgtcctcctcctaaaccatcactatccaaattgttcaggtcgccaacacgtacacggatataacggataataacattgcttgcattcactaccaacggataatctttcaaacaaataccatctcccggagcagattgtcctgcaatagtaatactatcattatttacacgaagtggagatttcagctcaatggtaccatctacagcaaagaccactatacgaggccccatttgctccaccgcatcgcgaaaactaccttcaccactatcattcagatttgtcacagtcaacacacgcccaccacgtccgccggtagtccatttcccatatccttcggcacccgggaaggctatttgttgcgctcgtatgcaagaaaccacccctaacaaacaggctacaagaataatctttttcatgatcaatgtattttaatcaggttattgtttcctctaatgaacaaatagaatatttttcctcccaaaatgataagaaaaaggcggtgcatcctaattatgcgcccgccttccccttttaccatcaagaaaaacttacctatcaataagatggatgctgctgaccggcaagccccggattcacatcgattatgttcgtagtattaaacggtaatatttctaccatattcttcttcataccatagaatacaccagtcttacctgtaatccatgcattattagaagaaagaccttcaacatcttccacacaaagatttcctttttgtttaatggaattaatgctgaacatattcagaattgtatattccacttcttccactttctttgcgtcagccggcacatcttcgctcttaaaataaactttgccatcagcctcaaagaattttctttttatggcacctttggaaccggaattcaacgtatgcattgttgttagttcagtctcagagagttccatatccaccaaatcctgttcagttattgagatgtaaggtaaagctattgtcggatctgcaaaagatggggttgaagccaacttataagcacgatatacatcaacatttgcatatcttccttcacgcttggccaattgaaccaacttttctttttctgttgtcagataatcaaccaatatcccccaacgagctaaatcgctcttgcgcagtccctcattagacaattccagtttgcgttcctgtataataaagtttttgaattcttcataaccggaaggaattgtaccaactttggaggcatcattattgaatgcacgcaggcgaacatcttccactgctttttcagcttcaggagtagcaccattattcaactcattcaaagcctcagcatacatcagcaagacatcagagtagcgcaatatcggccaattgaaatcacgtttactatcagaagaacctctgacctttttccagttaatacgatattttcccacacccataccggcaaaagtattcatttgataagcattgttgccagtagataacttaagaccataattacaaacagaaacatcacgccgctggtcgtcttcttcaaattcaaaatagaaggtcggcatagctatcatctggctaccgccttttcctaaaccttcattatccgtaccacttgtaggaataccatttgtataaccagtacgaacatcctgaccattagtactgtaccaaccgtactcaaacatagtttcatcattatactgctgatttcccaaatctctgaatatttgatcataatcatccaagagtcgattttctcctttagttatcacagctttacaagcatccgcagctatttgatagagttcttttatacgagccgcatcactacgttgtgcaattttcaaactactctgattatagggtactgtattcaagtcccaacgtaaggagtaaccggcagcgtaaagagctacacgagccaaaattccataagctgaatttttcgtgaaacgctcgggggtagcaaccatcccttcacttttccaagggagcaattcaattgcacgtttcaaatctccaatacaatgatcataaatagtatcacgactgacacgcgaagaagagaatgtagtcaaatcgactgtaggtatattagtataaggtacatcaccataaaaacgaactatgttccaatatgcataggcccttattgccaaagcttctcccagtagtgcatccactttcttcttctcaccatcactaacattcatttccggaagattcttaatacaaacattagcatattcgatggccttatacatatttgtataagtagaactcaacatactggaagtattagtatagtcatagttggccacattatatttagaattggactccgtagaggcggattcatccgtacccatcaataattgatagcccagttcttgtgtgtgcaaccatgaataaccacccatcacggtcatctccgctcttcctactgtttcaaaaacagtagaactatccgcttttgattcggaaggcatatcaagccaatcttcacaggaagtgaaaaccaacaacatggcagcagatatacctaaaatattcattatctttttcatattaattgtctaatttagaatgttaaatttacgcctactacccaactcttagaacgtggataagatgagttatctatacctggtgtcaaggcactgcttgatgcagatacttcaggatcataccccgtatagccagtaaaagtatgaatgttatttagagtacaatatacgcgggcattactgattttggcacgttgtactaatttcttcggtaaagtgtaacctaaagtaatagtattcaagcgcaagtaagaaccatcttccaaatagtaactactacgttcactaatagctgttttgttattacctgaaatattccataaagcatcaccactatattgatgtgggtttagagcagccaaacgtgctaaatcagtactttccttacctgttaatggatcaatcaatgtgaaacgattcttcattttttcaagcgtattttggttagccaagtacggaccaataaaacgctgcgtactcatgctgaacacatcattgcctacaacaaagttcatgaaaatagtcaaatcaaatcctttgtaagtaaaggtattgttccaacctccgataaaatcaggggctgcatttcctattacagtacggtcattagttccccataccggatttccatctgcatctacttcaccagccgtcggcctatatttagcatcacctggttttacattttcacgattagaacctttcaaataaggaataccatccttcaaagtatagccaccgtcagcattctgaacaaaatcatctgtcgtatagataccatcataaatcaaaccaaaaaattgtcctaatggttttccctcttcaatcttgaaacccatacgagattcatattctgctatgaagttatcagtttcaccatctccataaatatccaatacctttgaacggttaaaagctatattgaaatccattgtccaactgaaatccttcgtacggatattagttgtattcaaaactaattccacaccgcgattacgaatggaaccaatattctgaaattgatgagtataaccggtagaagttggtatcttattcttaatcaacagattggaagactcattattataccaatctacagacagattgacacggctattaaatattgatacatccaaacctatattggtggtggtggttttttcccacttcaattttttgtttccaagtgttgtaccgggtacaagtgtaatgtaatcgctaccattatagccataatgccccgatccataatctgtagcatacatattgttatcaacattattattacccgaagttccataacctacacgcagtttcagattctgaaagaaatcaaaatccttcatgaagccttcttcagagatacgccacgccgcagacgctgaagggaaataaccccactgttgaccacgggcaaacttagaagaaccatcggcacgtaatgttcccgtaaataaataacggtcactataattgtaagaaagacgaccaaaaagagaaacaagacctatccgactttttcccgacttccacgtttgcggagtacccatactgacatcattcaatccaaagttaccatctgagaatttgcgatattcgttatccaaattcatagactcttgataccaagtttcttgaccaagcaagacattaaaacgatgagcttctttcacattaaatgcataattcaatgtatttgtaatctgccatgagaacttttcactattgttacgataaccataaccataaggactttgattggaagaagctgtcttagtattaccattatcccaataatcatgacgaacttgctgccacatataacttccagaagtacggaaagttaaatccttcaatatatctatttccagcccggcattcaccgtagccatacgggtatatttctcgttagtaatagattgattattaataatcggattatttgcatcataattgtctccgccatacatttcagagaaaagatccgctaaatcagagcctaacagttgttcattggtccattttacaccaccagttaccggctgtaaaatagtctgcttcaaggttcctcccaatgaaccacctccatcaactttagtcatttgtaaactggaagaaaagtcaaaacgtacacctttccataattcatgattaattttggcacgaatactattcttttgataaccatgtttgtccattataccatcttcacccgtatagttgtagctcagcatgtatttagttttttcactaccaccactgatattcacattgtgattctgagtgatacctgtattaccaaacacctcatcctgccaatcaatgccagcacgattaccgtattcattagcaatacgactataggcaccagtataaaaatcaccagaattaatatctccaccaaaaatattcgagaagttatcttcattgccacgaagcaattggaattcatattgatactttacataatcttcaactcccattaaatccaacttctttcctaaacggtcaaaactaacaaaaccattataagatacttccgtcttacctgccttaccggattttgtcgtaatcaatataacaccattcgagccacgagcaccgtaaatagccgttgctgaagcatccttcatgacatcaatagtttcgatatcattaatatccacattctgcaaaccattctccatctgaaaaccatcgacgatataaagcggttcagtaccttgcgtaatagatgtaccaccacgtaccgtaatattgatatcagcacctggagctccactttgctgtacaatattcacaccagctgccttacccgctaatgcttgtgcggcagtagtcacaggggccatggctaaatccttgctaccaactgaaacagaagaaccagtcaattctttacgtttcaccttcgcatacccaatagcaacgacttcttccaacattactgaagattctttgagcgtaactgcaaaatgggttttgttaccaataagaacagtttgatcttcataaccaataaacgaaaccaccaattccttagccgaaacaggtacagaaagtttgaaattaccatccatatcggtaatagtaccaatggatttgtcacctttcaccgtaacagaagcaccgatcaccacgtcaatcgcatcgcgaaccgtaccggtaagcgtcttgttctgggcaaaaatgcttagaggacagcttattaacagaagcattaataagcacatttttctgtgtaagattctcatagattattaatataatttgattaataaataaatttaagcctaaccaaatgcacaaccgttatcgagcacattattctggttgcaaatatagaatttgaaatcagcctacaagatgtattttttgaccgaaacactttctcttttgattttcttaataaataacctaatagttcaaacaaaaaataggatttattgcagtattcttaataggttaaatataaaatcaatcctaaaaatgccattaaaaaaggatgttcaaaatagaacatcctttcttcgtaaactatcattacagttattcaaaactcaccgggtaatggccaattgggagtaggcacatgcattttctccatttccttttcaaattcaactattactccaggatatttatcggctaaattcatagactctgtcatgtcttcctttatattatataattctaaaggggcatcttttttaatagtaacaactttccagtcacctctgcgagctgcacgttgttttccgggaaactcccagtacagtaaacgattatccgtatccatctgtttaccatagaatagaggtaagacatttatcccatttaaattttgaggcaatttatctgtagcattagccaatgcggccaatgtaggcattacatccgggaaataaataatattattcaatttctgaaccggaactttacctggctgattaacaataaaaggcacacgaattcctccttcataaagttgacctttcatacccttcagtgaacctttacatcctaactcggccaatggtgcctgcttagcagctccattgtctgaagcaaaaatgatcattgtattttcacgcaatcccaatctgtcaagttctgccaacaagcgtccaattgctcggtccatgtgtgtgataagcgcagcataccgtttagtattcatatcccaagtttcatcatcataccaaaccgtttcatctataatataaggttcatgcggtgcatcataggccaaatataaaaagaatggatttgtcttgttcctatttataaatttaatcgcatcttccgttgaaagatcagtattatgttttatatgtttgtctccttcattctcttttatattttcaagtttctcattattaaaacgccaataaggatagtaatatggatcgttagaataaaccgtactaataagccagccgtaaaactcatcaaatcctcgattcaaaggggtagcctcaggattaaaaccatccaaatgccacttgtttaccaaacatgtccgatagccagcactacttaatacagtagcgattgttgtatcattcggtaacaaatgcattcttcgtataggctttgtacctttcatcccttcaatacctcctgcattacagaaattatcacgaatggtagtgtttcctgtattccgccccgtcatcaatgcacaacgagaaggagaacttattcccgatcctgcataacactgagtaaaagaagtgccagttgctgccagtttatcaatattaggagtctcaatatatttattcccataacaagccaaatcacaatagcccatatcatccgccaatataaaaattatattagtttttttatcatttaccgcagttgactgctgggccttaaccactatttgaggaagaaccaacatatttacggcacaaaatcctcctaaaagtttattcttattcataatctacatttttttattcacagtttcattctgtctcacgaaaattatactccaacacacattatggcatatcaacattctcattatactccaatatcaattcatcatgagctttaatctgaacgtcatccaatttccagtccttagcccaaatgatttttccagctttattaccttcaatacagacattacgaagtataaagttttcgattttgctgtttgctattccaactacattcatacaagttcttgcattagaagccgttacattatcaagagtaacattccgaaagacaggagtaccttgttccaaacttacagattctaacattttactccagtacactggaattttctccatatcatatcccttcggaagtttagaaatactatatgcaggattccaattcaaatcaacaacaaacggccgttcaactcctatcatctcgatgtcatacaaataaatgtcttcaatcactccaccacgctgacaagtactcttgaaacgcaatccacattttgtacctacacctttcattcggtatgccactatattacgaattccccccgaggtttcactaccacaagtaaacatcccccctccagaaccagctacacagtcacgaatcactacatattggcaagggcgattcaccctaagcccgtcactatctcgtccagctttcaaacagaaattatcatcattgcaatttatattagcattctgaacaagaatatattcagatgaatcaatatcaatgccatctgtacttggaccatggccttcaatattattactaattataatgccatcaattgttatatgcttactatacaaaatatgtaaactccaaaaaccgggctgatacaatacaatatcacgtacagtcacattctcacattcggcaataagaattccgcgagggcgttcacaatcataatccacaatccagcgtaatccctttgcctcataatcctcccgcatattccagtacttatcccaaaacaccttgccacgcccatttatcactccatcaccagaaatagcagcatttttcttaccaatgatatttatcaatgcagaaggccactccatttctattcctgcaacgcgcgtatctatcttcttataatcacctatatcttgagagcctataagagtaactccttttgaaatatgaagatttacattgttccctacaaataaagaaccggtaagataaatgcctggatgaaacactacaattccgcctccggcttgttctgcagcatcaattgctttttgaatagccatagtattcatacttagagcatctccctttgcgccatagtctgtaacattatatacagcctgctgtaccggataagacatagcacctacttttttcatccaaaagaaatctggtatttctctgccatgagcattcgtggataaaccggtcatccatacagacaacgcaaacagaataaagtaattcttcattatataaattggattaacaagtaaattatacgttattgaaaggtcaattagtaaacaacaaatcttgtaaaggacaaaagtaaacaattatacaaccacaattatattccttttgaccctaatacttttctttttgattttgtccaatcaaaaagtatctattatctcatcttagcttaaattctctccgcctattattgtcagaagagtctttcaatctttcaaaagtatagtttattcctcatccacaattccggtttcacgcccaaaagatctatattccaagggggtaaatccagtacgttttttgaaaagagagaagaaatgctcagtggatttataatcaagcataaaagatatttccttgacagactgggatgtgcctactaacaactgctttgctttacggagtttcaattcctgaaaatatttggcaggtgcatatcccgtataatccttaaaaaccttgcgaaaccaggaatagctaatattcagtttcatagccaattcttccggatcaatatctttgaacacattttcattcataatgattttcgcttgttcaatcttttgatcaacatcaccgacctcaaaaatcttattcttagaaatggaaaggatcattcctatcatatgcaacacaataccagaaagatattgctgagaagaaatcttatcagcttcagcaatttccaatgcacgcgagaaaagagtaactaattcttcattcaaccccacctctaatacttgattatctttagaaaggaaaccacctttcaacatatcatctatgaccggtccttcaaaaccaatgtagtattcattccatcctgtctgctggtatgggtggtatgtgtgccactgtccgggaaacagcaccatgagccttcccttacaaacttgcttctcaggagtggtctcagaggtaaataatcctcgacctttagttatgtaaactagctgatactcacgtaaaacacgtcctttttgagcattgaagaagtaaccagaagggtgatccttcaagggatagggagaattcggctggatagactgaaagcctacagtatttacccacaggccgaatttctggtccatgtcatttacaatcaagtacttaaattcaacccctaaatcattatagttcttagtcataatacgtgtttttacaggataggataggtaagggcaaaaatagaaattatttgcgaataaaaaaaagtccgctccgggttaattctaaaaatataccggagcggactaataaatacgaataaagagaaagagtctatttctttacgacaatcttatcatattgttgttcggccttgatttctgtatacttaggtgcatctatcatctcgataagtgcacggagtacagggccttcacccataggatcgttctcctgggtaggacggttgtaatagtatgccacagaaggcataatgccggttcctacacaaatagaagttacatcaccatcatctgagatttttttcatcatacccttcaaaccttgttcagccacatagataaagtccggatgcaaccaaccctccttcacaccacgggcaataccgaacacaaacatagcggtaccagtgatttcttcataagaatcttccttatccagcaattgatgccaaagtccgttcttaccttgatagcgtgctacaccactggcttgctgacggaaattttcaataaccgcttcacgcatcggatgatctttcggcatcatactgagcaaatcagcttgtgccataaacacccagccattggcacggctccagtgagctactccatgttccttgttgtctgtatgataacagtgataataaatctgcttttcaggacaccagagatagcgattataattcaacacctgattaacggcatcattgaaatacttctcatcaccggtcaacttacccatacgtgccaaaaaagaaattgccatgaatgcatcgtccgcccagatagtattaacgtgtggccagatgcgggcaatggtaccatcaaccagacgaggttcaccataattcagatgttcggcagtctcattaatgtaacccagaaatgaatcattaggatacttcaactgcaactctatcaaactggctcccatcggtccattatcgtccagacgtttgccacggaagatcatgtgccaactcaatttgcggacagcattccaaccatcccgcttaaaagcttcatcatattgtttacggaagaaatcaaggttaccctcgttgaatacgaagttcatattcttcaagacatatttctcatacttcttatcaccgagcttatcacccagttccatcaaagccatatttgttaccccattggtatagtgccagttattatacttgcaagcaacctttacatccatatcaagaggtaacttcttgacggacttatatatctcacctgtcttcgtattcttgaactcgtatgtagtgctggcaagaatgcggtctgcaatctttacggcagcttctcttgccgtcatcttagtttgggcggtaagggttgccactgccaacagcagggcgagggaaaagaatgttcgtttcatgatatttgtttaagtacttggttatcatttaggaagattaaatgcgcgagtcatttcctgcatttgctcctgactcatgccatcaggctcaaagcccatgtttttggcagcaatataaatcaaggcagatttattcaatacatctacctgatcgaaagcagacataacatccacatctaccgcaaaaacaccatgtttttcccacatagccacgtcataatcttcaagttgttcaatagttgcttccgccagtttcacggagcttggcagttcgtaaggaatgatgcctaaaccacgcggacagaaagcctttgtttcaggaatcatactccaaagtaaattggtagccacatctttctccaggaatttcttgcaatgcgtcatagcaatcagttcgataggatgggtatgcaatgaagctttatagggagatcctttctcaatcaagcgattgtgcacactaagatgggcaggaagttcggaagtaggcatcaccggatgatcggcaatgatgacatagctggcacagtcatccagaatacgaattacagaaccgtgctccatcggccaacgggccagatcacgcatgcgtttattggtgcccttgcaatagaaatagcaatctttcagatacggaagagtagcaccgatttgtttcacttcgctgatggcaggcaatgcttttatttcatcgtctacaaattcagtaatattcagggtgatattaccgccattacgttcggcccaccctttttgccagagatatccggcaacctctgccacttgattgactgcataagtcaatgccggacggttttcgagaattgatttcattataataaattaagttacgggttacgaactacaagctacgagttgctgcgctatcataccgaaaggcacttgtaactcgtagctcgtagctatatatactattacacttgtgccattgccaccacaataatagaagatatcagaactaccaaccccagaataagaaccgcaatcgtagtattgctgacacctttccattccttcaacagaattccccagacattgctgaacgttacgttcaatgacatcaggatactccaggagaaagcaagtagtacaggactgtctgtcaggaagctcttacccatttcaaggccgaagaactgggaataccacaatacgcctgcaagcgcacagaacaacagattattcgtcagtaccgaacctttcacagaaagatattccttacccgtcttattcttgatattctgccaaatacagtaagcggcattcgtacagaaacctccaagagttaccaggaaaattacaggtaatccggcatagagcgcttctactccaccagccaaagcagcctcttttatcggtgttcccgcatccagaccgagagcgaaacaagcgctcatcacacctgccaacagagccacaagcagcccctttgtcagagcaaaatccttaacggcagcgcgtttctcctcttccgtcatattcttggaacgaagactaccggcatatccaataatagcaatacctgccaacgtgatacatacgccgatgagcaacatcagtccttcaccatgaagcaagtcttttccggcaaacaaagccgggaaaagtgttccgaaaccggcgcacgtaccgagggcaatactctgtccgagtgctacacccagatagcgcatactcaaaccgaatgtcagtccacccacgccccacagaacgccgtaaaccattgcaggcaaagcgcctccggccccccaaagttcaatcagcgaacttcccgccggaatggcaagcaacgcacctaacaatgggaaaacaagccatgcaaagattccctgtacaagccagaaactctcccacgaccagtttttcaccttgttaatgggtacatacgaactactctgtccgaagctcccgatagctataatcaacaatcctatcagtgtattcatgataataacgtttagtgataaatgatgagtgtttaacacaaagaaccgtacaaagatacagctttctccgctaaacactcgtcactaaccattaatccctcaattacgtttcgacgtaacgtctgcttcgtatttctgtatctcagtaatgaattcctcacctacaggtacaccgttcttcagacagaacatatcccaaacagcattccaaggcagagattttccttcttcgagcagagcaaggcgttcaaacagctgatcgttcgcctcgtatttacgcaatgtatccagcggttccaacagagcttgcaacacacacttctgtgtagcacggctacctactacatacgcaccgatacgattgatagaagcatcaaaatagtccaaaccgatatgcacgcgatctaacgcattacaacgtacgatttctttgcaaagatccatcgtctcatcattcattatcgttacatggtcagaatcccaacgtaccggacggctcacatgcaacatgatttccggaataaacagtaacaatgaagacaacttgtcggcaacgctttctgtcggatggaagtgacctgtatccaacgtaacaatcttattacggctcacaccataaccgatatagaaatcgttggaacctaccgtataactctccagaccgataccgaataccttagattccacacagtccttcatattcttgtattccacctcgaagatacgatccaaagaatccttcagtaactcgcgatataacatacggtttacagtaatatccttacttccatcatgcacccacaggttcatgatacaaggatcgccctggcgtttacccatttcctcggcaatagcacggcaacgtttagtgtgctctacccagaaatcacggattcctttatcaggattagcaagtgaaagattaccactcttcggatgagagaaggaggtagagttgaagtccagcttcatattgttttcggccgcccattgtatccagctttcaaaatgagccggctccacctggtcgcggtcaacgaacttaccgccgaagtcaccatagatttcatgcagattcaaacgatgagttccaggaatatagctgactgccttcaagacgtcttgtctcaattcttccatattgcgagctttgccgggatagtttccggtagcctggatacctcctgtcagcgcaccctgcgcttcaaatccggctacatcatctgcctgccaacagtgcagggagagggaaatcttttgcaaagcatccattgctttttctacatctacgccaatagccgcataacgttcttttgccaattcataggctctctggattaattcttctttcatgatggtactagttttaattataaagttttaagtattaagtattttctattcaggcggtaaggtaaatcaggctaactgcaaaaagtgcagataagcagcattccatacttccacattttccggggtgaaggttttcaacggaatggaacggttgatgagctgacgcatggaaacaacgtcactcgccgcacccgctgtaagggcttgtatcatgacattaccgattgctgtcgcttctgacggaccggccactactggtatacctactgcattggctgtccactgatttaataaatcattacggctgcctcctccgataacatgcagggcctctaccggacggggagaaagaccgcgcaggttctccagcacctgacgatagcgcagtgccagactttcgaagatacaccgtaccacttgccctcgggtctccggtatcggctgatgatggtcagcacaataagtacggattgcctgttccatattcatcggattggcaaacagagcatcatccggatttatcaggctacggaacggttcactggcttccgcttcggcgatcagttcgggataagagatttcttcccaatcgcaacggcagcgttccagtaaccacattccacaaatattcttgagtaaacgaatggttccggcaacaccgccctcattcgtaaaatttaaagcttcggtttcttcattaataaccggtgcatccgtctctacccccatcaatgaccatgtgccgctactcagataagcaaagttacgatccaatgccggcacagccgccacagccgaagccgtatcatgcccggcaacagcaatcaccggaattgcccccaacccagtgatcgtttgtatttctttagtcaatacacctaccttttcgcccggataaacaaaacggccgaaatgctcttccgtcaaaccgatttcttttaacaatgccggttccaaacgacgcgtttcagcattcaccagttgcgcagtggtggcaatggtatattctgtcaccatctcccccgtcaataagtaactaagggcgtccggcatgaaaagtattttatcagctgcttccagtgcactatctttattacggcgtaaggtatctaattgaaaaagtgaattgaaattcatgacctgaatacctgtccatccataaacttgcttacggggaacacgggcgaagaatgtctcaggagcacccatggtatgcggatcacgataagaatagggctggcgaagcaatccaccgtctttacctacgcacacaaaatccactccccaagtatcaattccgatagaagttatctgtacatcatccatgtgggcagctagtttcaagccttccaaaatgtgacgatacaattcgtaaatatcccagtagtaatgtccaccgacttcgatcagatggttaggaaagcggtttacatcctgcaattccaatccctgcggagtaaatgttcccaatatggtacggccgctggtagctcccaaatcaaccgcaaaaaagcaatgtttcatgatattaaatataatttgacgatacaaaaataggggaaacctcccctatactttgtattagttttgattgaaaaggtgctgtttctgatattcttaccagagagtgcacagagatcaaattactcctgcactccttcacaataacgggtcactatcttttctccttccgtattacgaatattcacattcttcatactgatattcttactatatataaattcagcccccaatttagaagtaatatctatatcttccaacacaataccatcaatcggcatttcaggaataccattgaagaataaagcacggcgggctccggcgcaaaccaggttcttcacatgaatattacggaaacaaggtgtagtttcatccactggcaacggttctactttagcaggtaccttctcaccactttccaacacttcaacagccgatttgccaccataataaagattgaatgtaatcggctccgtcgggatatccatcatggcaatattacgtatccagatattctcaacaactcctccgcgcccacgcttgctcttaaaacgcaaaccgacatccgtccccaggaactgacaattgctgacagagacattgcgtacaccaccactcatttcactaccaaccacaaaaccaccgtggcctttgaatactgtacaaccatctaccaccacattctcacaaacacgtccccggcggcgaccgtcttcgtctttgccactcttcagacaaataccatcatcgcccacatcaaatgtagagttcacaatcagtgcattcttgcaagattccagatccagaccatcaccattctgcgcataactcggattacgaacctgtacttcttctatcaacacattctcacacatcaacggatgcaggttccatgccggtgaattctggaaaatcacaccctgcaaccatacattcttacactctatcaggctcaccatcaccggacgaagaaaatgacgcacactctgccattcttcctcggttttcagattctgaggtacgttcatattactgatagtatcccctttcaacgtctgcggataagggaaccagtaggtgggacgtttatataccccaccccgggcgatagtctgtttccatacaccttctgttactttctcccgtttcagaggacgccaataatgtccgttaccatcaatggcaccttctcccgttatcgctacattttccagattgcgtccggaaacaggcgattggcaacggcgggtatccaatccttcaaatacagtctctaccaatggatagaggtctacatcaggtgaaaagaggataacagcacccttttccaagtgcaggtcaatattacttttcaggacaataggacctgtaaaccaaacaccggcaggaacaatcaaatgtccgccccccttttccgccaaggcatcaatagccttggcaaaagccgccgtacaaagttcttcgccattacccactgcaccaaagtcagcaaggttcaccttgcgatcggggaatttcggtgcttctacccttggcatatcaaaaggcaggtctttatatactgcttcatacttatacgttgaagattggcaagcactgagcaaccacagacacacggctgcaatcacatacaattgtttcgtcattcttagttcttttttatttataatcagatatttatttctattctcccagatagaaggaaggtacgggcgcttgcggatatcccatgctgcgatgcgccacatagctacgataaagcggatcctgcatcagggttacgcggcggtcgcgagccggaatattggtatgatagatacgcaactctcccggcaaagcagtaatcagttcttcacgccaatcaccttccaggtcagctatcatcaagatatcaccttcgattccttcagtcaacacttctccctgccatttccagatgctttgtttgcgcccacctgaagatgaagaagctccccagcggttatcatctcctttaaaagtctcacgcagcagatccgcatcccaccatatccaattacggcaaccgggtacttccgcatttgtagtgtttattttcttgccatcggcagtgagcaggtatttatccgtgctgccacctttacggtcttcactggcaaaacattccataccgggatgtgaagaatcaaaatcggccaccataccgtcacctacatgataggtggtctgcccgattttccagatcaatttgccggtagctgcatccaccacggaaacaccgcgaccatcctctttcttcggttcactcaccataaacacctgcataccttccatatcaggatgaagtttgcagagataagccttgtcactatgccccaaaccggaagaccaaagtaacgtaccattatcatcgagcatacacgagcctaacagaatctcatcccgtccgtcaccgtccacatcagccgtcaccatgctgtgcgcacccatactgcgcacaatgggattttcttcatccccatcccagcgccaggcacgttgcagttttccgtctttcagcatccaggcatctaccaccatcagtttgtaagtgccgcgggcagccaatatataaggtgtctttccatccagataagcaccccccatttggttacggttctggcgaatcagatttccatagcggtcgttccgttcaggccagtccacgcgatctatctctttaccggtcatgccatccagcacggagaggtattcactgccaccacaaacacgacctttttcattctttacatagtcatcagcagcagtcttgatagcaacttcagctttcccatctccattgaaatcgtatactatgaaaggagaataccagattcccggttcgatacccggtcccatatcataggtccagaggtagcttccgtcactcaggtaagcagatattttatatgtctttccggttgtatctccaggcataccggggtcaacattcgtttcgggagtacggatgatatagtcataaataccgtcaccgttcaaatccgctaaagcgatcttcccggctttcacactctctttcaatggaatagaagtataaggcttcaattcggaaagaatcacttcccgtttctccgacaaggcagatttctttcctttcaccagaacttccacccaataagacgccttttcggcaggagtgacatccataaagtcacaagtctgtgtaagcggctttttagtcaggcgacgcgttttaccgtcagcttcccgatagacatgaaatgcagtaccgggagcatccgatgccaataaccgccaactgagataaatacctttgccatcgcgggcaggggttactgtcagtccacggttcagattctcagtcacccgttcccgggcaaaaccttccactaagggtttcggttcatgcctcggatcaagtatttcatagtagtaatgcctctcgcgagggtcctgggcattcagagtactcgccaacccaagcaggcagagcataattagattcgatttcattgattatcgctttagtttgaggatgtaccggaatcaccacagattacacagatttacacagatataaatatgattattaatgataaaaaaataatctgtgataatctgtgtaatctgtggtgatttcctgtctccgaattataaagttcttatttcaaagtctgcataggaatcaagtgtacaggtcccagcaaaccgcttggaaccagctcccatttgccataattatcctttttataatggatattcacaatattggcatccttataaatacgccagggaacgtcgcgccgatccatatcagcaatacggttagcgggcagattggttacttccacctccaatgtattcacgcccggacgaagatacttacctaccagacaacgataaggaactgcaataagcgtagctaccgcctgtccgttgatgcgtacacgggcactctcacgaacatccccgaggtcgagcatccactcttcgacatcggcaggactcttcagtgtaaacgtagtggtatagcaagcagctcccatcacattctttgtaccttcggcaggaatttccgtccatgaaccaagagatacactgtccggagtggcagcaaccgcagggcttgcctctacaaagcggaatccccatttatcggtaaaagaataagttaccggagacgtcttcttcacatcgttctgcaccacaggcgtccagtatccatattcgggtgcagaaacttcctggtccgcgaacgtcttcaggataacagattcaccggatgccaattgcaggaacacttccgtcctgccattattttggcgcaaccgtgccttaccggaggttccattcattggattataaagcattgccgaacgtgcctgcacagccaaaggtatccagttttcggtatcttctgttttcaaagcagagatgaaatagtggtgtccttcaggatgcgagcggcgaatgctgcttaatccgaaagttgttttcatctcttcgggaacagcatcagtggcggccaatgtacgagcataatctgttccaaagagaatatgtccctttccttcccgctcctttatctgtgccagcgccttattgaactcagtacggcgtccttccaaagtattcaaccccggcacatcctccggatattgctccagaaaaacaatcgtagcaccttcatctgccagacgaagcagtttctccagtacatcggcaggcatcaggcgggcaccgggaactaccagcgctttataagagacaccaccggaagtcaatatcttgccgtcctgacacatggcattacggatgaagttatcagaaatatagtccatatcatatcccgcactataaatacgatgcaccgcctctataaaacggggagcacgttttgacattttatgaatatcgaaaagcaacagacgtccgtccaactcatcccacatgtcatatacaggcagataaaccaggaagtcattatccggttgtcccatttgcaggaaactctggcaacgggtgacataatcgaaaaatgcaggggcatcccgccaaatattattcgtaggactcatatcaatggaagcatagaacttccaacccggccaggcagcctcagcgggcgagtaagtggttccatgaaaatacatgtgattcacacccgagataaacatcaggtccatatcgggtttgcactgcgaaagtgaagtgcggaagtgctctgtcagccaagtgaatgtttctgaagtagtgaacggttttccggcaatatgcgctgccgaagaagcatatttcagcatggaaagatcagagtcgttgggacgcgtcagcgaatccttacgcaatcctcggataccgaagtcggacagtccgaacccctcacattcgggcacgtcgaccgtcgcataaagatctatcagattaccgggagaaccgtgtgcctggttacgggtacgtgaaccatgtttgtgcgcccagtccgtccactggcgggtgaagttctcctgaagcagttcggcaagagtttcgcggtaatcggagataatgcgacgggtagtctctgtccggtctttcgaaaggaaatccggaagaaagtgttccagtttatagccacgacggcgggcaaactgttcaaaaaggtcgtccgtccagtcggcaccgtaaacttcataagagtcattgaaaaaattatgcggatactctgttggagttccggcagaaccatcagtcgcctttccggcaaaagcccgttcaaaccggttcagataattggatactgcttttgccgaaaaatggttcatcacatatccttcaccaccgggagctgcacgcttcactttctgaaatgtcttacctacgaaagcggcaatcagccgccactcccctttcggagccttccataccagctttccgttctctatcttcgaagtcaggtcatagcaacgcacagccttttgttctttcgaagtagcagcgtcagtcagcactctgaaagccatcagcttacacagtttggcatacggacgttgtttttcatccgtcacttctatctttgctttcaggcgttccccccccttcagtgtatattcttcaatcagcaatttacaggcagcatcttctatacccacttccgggccaccgaaaggccagcccgtacctgtgttcatatcaatcttcatacccaggcgtgcagcttcactttccgtatggcgtaacatttgcatccacccgggagtcaggaactgaatttcgtttgcatcattaccctgcaccccatagataggagtaacttccatcgtgcccatccctgctttggaatatgcttccagattgcgggtcaggttagccgcatctaccgcactccccatccaccaccagcgagcacccggtttagcttccgtagttacttcaggccacgctatattttgtgcggaaagggtcccggcacagaaagaagcaaagattattgccaataaattctttttcatgatatatactatttattcagctccagacagcccataatgaacggtcctgttgcttttgcatcattatcccgcatcttctcaccgatataatattcgaagctgccatcgcgatacggatgtccgcccaagccgcccacctggcagcaacgtgtcagtgtcagcgtaccatcctggcgttctaccatcagtttacttttcaatcccttgaaagccttctcagccacagcacgatatttcgggtcaatataccctttattcacagcttttgcataagcatacatgaattgcgtggtcacagatgcttccgggaagtttcctttccgtttcggctggtcgagtacctgataccacaaaccatttttgtcctgataagcgggcaacacttcagccagtccctgtatccagccaatcatccgggcacgtccttcgtggttttcggggatgaaatctaacgcatccaccatcgccataaaccaccatccgatactccgtccccagaagttaggcgaatgtcctgtttccggatctgcccaacgctggctcttgctttcatcccaagcatgatgataaagcccggttttggcatcatacgtatgtttttggcaaagcgtaaactgctttaccgcctcatcaatccattcgggtttgttgaactccgcaccatattgtgcgaggaaaggagatgccatatataagccatccagccaaatctgatgctgatagatcagcttatgccagtacgcgccttccaacgtgcgcggatggtttttcagttgcttaaccagggcatccattgctgttttatatttctctttgcctgtttcacggtacaggtcgaacaaaaccttacctgaatttatataatcgaggttgtatgtttccacatgatacaaatggatttctcctttatcattaatcagcgaatccgcccattgctccacatagtcgaaataacggcgctctcctgtcttcttccacatccgcaacatcgcacagcagcctacaccctgcgcatatccaaagaacagacgcttcccatgatccaactgataggctttcggaaaacgtaccatttccgaatcggcaaaccaacgggcatacgaatccggctcccacgtatctgtacggaaaggagtagccgggaatccggctttattataaagattcacgcggaagaaattgcaatatgcataacgcacagctaccggcacggaaacctgcggagcggaaacttccagtttgtctcccctgattagggccgtagcgggataaaagcggcgatcttcaccggcaacgataaaacctttcaccggttcattgtccggagtcatcagtccgtcgtcagcatagtcaaagctcaatacagctttattcccttccaccttcattgtcttgaacaacgggccggaataagtcacgtccttaccatattgctttgccaatgcccaggcagccagacgttcacccgtcactgttttattgcggggatggatatcgagcgagtcgcccgcatcagtgataactgccatacccacattcttgagtccgctttgccaggtccggagttgagcttcgcggatagtggccggctgtccgtagtgcggagctatctgcacaaagtagaatggcatatccggctgtttccattccttacgccaactgtttatcatattggtgaatacctgctggtatttatcggcacggatagagtttgactctccctgataccagatatttccttttatcgtatatcccagaatgggatgtatcataccattccacaatgttgcgggtactttacaatagtttttctgttgcttcacgccttccaatgcaaagtctttcagcacatcggcataaagcggatttttcttcattacatccagctttgtccatgactccgcatgtgttccgccccaggtagactgaatcaaccctacgggcatcttcagctctttatataacttacgtccgaagacaaagcccacagccgaaaagtcatacaggttcttcggattgcaaaccaaccattccccctcacagtcgtccaactcaccctcgtgcgccaactggtgtttcacatggaacaggcggatttccggataatcggcatccttcagttcttccgcttcattcagcattccggtattccacttcacatccggatgacgcgatacggggaactccatattactctgtcccgtacaaagccaaacttcacctattaatacattattaatggtaatctcattttcaccgctcaccgtaacggactggttggttattgccttcggtgtcttcagtttcacggtccatttaccattggccgcagccttggcagtcacagctttatccagccatgatgctttaaccgttactttttctccgggcgcagctttcccccacacattcacctgtgtgttttgctgcaataccatgttgtctgaaaaaatagcaggaagtgttacctttgcttctgccgtgagagaagcaatcaaaacgaatacaagaaaaatagaaaatccaagaagctttttcatgtgcctttaatagtttatagattcacatagattattttatagaacatgccaatacctgacggcacaaaaataggggtttccaccgaaaccccttctttatattttgatagttttcttattgcttttgtcgtttccataaaaacagaattggcattatctatccctttatcttcagccagccccaaatcgttttctttcgggagatgctaagtaaagcagtccccatcaagcaacaggcacagcgtaactctttattggaaagtttattaagattatcaacaataccgggtaaagggtagttctctttaaaaaaggaaaatacatcggctgagttttctaagtcggttttcatttggcaagtgcaagtaaaaggttcatccatcgtgttataagttttaaaggttgatgtcgcccctatacctcttataataaaagtggcatgggaactattaacatattatccactttcgaggctctggtaaaccggtaagaaaataataagcaatagctccacgccacaagatgtatataacaaagttatatgcaatccggacgtggagaccttcacttatcattcgctcttattaaaaatgtaccagatttccgaaagtacgaataataaaatgatctccaaatcataaacatatcccttcaccactgaagaaatatgcaacaaagatacacaaaatatcggaatagatatcataggatacggcaattatcatttagctcattatgatagagaaaatgactctaccaacgttttagaaataatgttcccgaccggaataacgcaatctaagtattgtagaacggtatgttaaagatacaaatgcctatttatcccatacaaaaacaacgcaaacaataaatttcttctattggaaaaatagttctctatttcctacatcctacaccggagacttttttcatttgattatcagacaaatagatgcgtggagaatgatgtagaatggtgtaggcaaatttcatcctacaccccaaaaaacaggctttcaaagcactttttctattacaaccagctaataatcagactctcaacatgttttttacataccttacgcacatccccgtaaacacctctcttttacaagaaaacagaggatatctctgcattattcttcaaaaaaacttcctgattcctttcatatcataatattaggcgacgaaaagaacttgaaaatcctgttgcgagatcgacaaatcccacaatagaatacttaggaacaataagaaaaatggaaagaaggtcctatgaaaacccaacttagccttattgtttttgttcctttgcccgtaacaaaacttcgtttcacagttgagggctctacgttttacagttgagggctgtcggtcccacaactgcgggctgcacagccttcaattgaaaaacgaggttttgcttatagcataataacattaacattaaggctttaggagaaaaaggaaggagcatatcaagtttttcctctatcattcagctttctatataacgagataatgaagtctaactcctgcaaagcgctctttcttatttgctttacggtgcaggattcatctccgtgaaactctgtgttactccgtggcgaattaattcataactcaatagatatttattatctttgctacagaatttctaaacaacgaatgctcctttaatgaaaaagttccaaatgatattacaagaaagagtcaaactgctgctgtttgtcttgctttctattagtttgaactctttctctaccaataccaaattctacaacatcagtgacacctatggcattacatcaggagaagcattttccatctgtaaagaccagtatggttttatctggacttccaccaaaaccggcattttaagagtgactgaaggcgactgccgcaattatgaacttccttgccgaaccacagattttgtattcgtaaagctgacttatagcaattcacaactgttctcctacaccaataacggccaaatattccattatgacgaacctacagaccagttcttcttcctgacagacttgcgggaagaaaccgataatagccacattacaataggaaccatcgttgccgatacaagcaatgtactttggattgcttcctcgatcggactctttaaatatgagaataacatacttacaaaaatcccacaaacggaagaggacataaagcatctcactttttatgacgacaatcacttattctatattacatcggcaggcatttcactactgaatatttcgacatcagaaagccggcttctttactcaaacactacggaagatttctttcaggtacccagcctgtactatgacgaccagctaaaacgtctatggattggaaccggatcggccgggcttttctactatgacatcatccggaaatctttatcagatatccctatcagaaactttccgaagcaacccattcttgctatcagaaaggatgccaaaaacacccttctgattggtattgacggacaaggtatctggaacatcagcgaaaaaggagatacaattctccatatatataaggaggacctgaacaatcctttttcactccggggtgacggagtatatgatattctttgcgacggttcaaaaaactggatagccacattcaccggaaagctgtctttctttgaaaacaacaactcccagatcacaccggtcacttaccagataaacaacccaaactccttaggaaacaactacgtcaaccagatcattgaagatcacgaagggcatatatggtttgctacgaacaatggtgtaagtcgctgggatgcagcatccaacaagtggaagcattattaccagaataaatcggaacaggcaaaggtattcttatctttatgtgaagataaccagggacatatctgggcaggaagttattcttccggcatctatctattggatcgtgaaaccggaaaaacgctgaaacattactcctccaagaccaacactcccggctttacaggcgatttcatctttgactttttcgtggataaagaaggagacgtgtggataggcggcaaccaaaagctatcctgttatctggtaaaagaagatcgtttccgtgaatatccggttcagcccgtcagcgcgtttgccgaactttctccggggaaactgttgcttacaacctcacgtggtttgttgttgctggataaaaatcagggaacggtggaaacgttagttgaaggcagtctgactcaggacgtagtagtaaccggcaatacaatatgggttgccagttgcagagacggcctgataagatatgactatgacaaacaacaaacagagagatttacaacggaatccggcctgacgtccaactatgtgaacagtatcttatttgacagcggtttcttatggattggtacagaacgaggcttatgccggctcaatatcttaaataatacaatccaaccctacacatcggtctattccctttcaaccacgactttctgcgtcaactcctgtacgcggctgaagaatggcaagctgatctggggaacaagcaacggtgcaatcatgtttgcgccggaactgattcaggaaactcctccacgaggaaatatctttttccagaatatcaccgtagcaggccgctccatacgcacaattcccggtttattaaacaatactcccgtcaatcaacagaagaatctttccttaaactacactcagaacaatttcatgttagagctgcttccaatagggaattcttcaggaaacatgaaattctcgtggctattagagggattggacgcaaactggagccgcccttcggaacttcactttattaattataccaatcttccgggtggaaacttcaaattacacatcaggatgtacgacagttctctatcgcaaatgattgatgaacgcagcctgaacatacacgtcacgcctcctttctggaaaacctggtggtttgcagctatcatcagtctatgcaccatctgctatatcatttatgctttcaaaagttattcgaaccgcttgaagcggaagagtaccaatgacaggcttattgccgatgctgtccaggcactcatgcaagaaagaatggcacaggcagaaccgggcatccgggaagaactgcctgtgccccagagtaagccaagtgatccgttcgtaagccgggcaattagcatcatcaacgaaaacatttccaatagcgaatttggaaaggaagaatttgccgcagccatgaatgtgagttcttcacttctatataagaaaattaaaacattgacggatcaatcgccgtctgactttatcaagaccgtacggatgaatcatgctctcaaacttctgcaatccggtcaatatactgtaaccgaagttagcgaactttccggtttttcaagccttagcattttcagccgcgccttcaaaagctatttcggcaaaacacctaccgaaatctaaaaaaagtctcaaaaataaggccggagaccattatgcaggccttttttatctgaaatgcaaaatgaaatatctaaaatgaaaagtcctttccctatctcctcccctaactttgcaggcagaacttttaaaatatcagaataatgaaaaacatgtatcataccaatcattccaaagtattatttctgttactctcactattatccattctattggcagcatgtagggaaaaagagaataaggtcaaaacaatttgtaatccggtaaacctaagttatcgtttttcactcgactctccgtcctggcgtgaggcagcagaccccagtatgataaaatacaaaggagaatattatctttttctttctaaatccggcggttatttccattcaacagatcttgttcattgggatttaataaccactgacagtcttcccatcgagaagtatgctcctaccgttatggaaatggacggagagatctacttcacggcctccgtagccaccaacaaaatctataaaagcgctgatcccaaatcaggcaaatgggagttggtaaccgatcagtttccttatatcctggcagacccgatgttgttttacgattcagatactgacaaagtatatctatactatggttccggtgcagccactcccatgatgggaatggaattggataaaaaaacatttatgcccaaaggggaagccattcccttattttacagcaatgctgaaaaatacggttgggaagtatccggagactataataccaattacaagcacacttgctggcttgaaggcgcatggatgaaccaatacaaagggaagtattacctgcaatatgcagtacccggtaccgaattcaaaagttacagcaacggagtttacgtatcggaaaatccattgggcccattcactttactcaaacataatcctttctcttataaacccgaaggttttgtcaacggaaccggacatggcagcacatttcaggatttatatggaaactactggaatatcggtacttccacaatctcacgaaggcacatgttcgaaagaaggatttccctatatccaaccttctttgacaaagatggggatgtttatgcatacacagcatggggagactatcctatgattgttcctgataaaaaaatatcttctccacaagatttattcccgggatggatgctcctgtcttataaaaagaaggtagaagcgtcatctacattggaaggatatcctacagagaatgccgtgaatgaagatatcagaacatggtggagcgcaaaaaccgcagacaaaggagagtttatgactgttgatttagaccggaactctaaagtctatgccattcaggtcaactttgccgaccaggatgctaccgcattgggaaaatcggattccatatattaccaataccggatagaagaatcccaagacgggattacatggaatctgttagttgacaaatcagaaaacaaagctgatgctcccaatgactacatccaattggacaaaccggcagacaccaggtatatccgtatcaccaatatctatttcccttccggcaagttttccatctccggcttaagagtgttcgggaaagtggataaaccggttccggcaactgcccaattcacggaattaaccagaaacaacgataaccgcagaaccgtaaatctgagttggagcaaagtcaacgatgctaccggatacaatatccggttcggtacacagaaaaacaaattataccataattatctggtatatgaagacaacaaggtatccattaacatattgaacgctgaccagacttattatttcgcaatagacagtttcaatgaagcgggtgtcactatcggaaaagaaatcaaaaccattcaataaaattcatacattaatatccacaataaatatttgtattaaaaacaaccatcaacaataacgattatgatgaaaaacaagattttagccctatatctggggttccttccacttttggcaacggctcaaaatccgattattcaaaccaaatatacagccgatcctgctccaatggtgcataacgatacattattcctttatgtgggatgcgatgaaaaggatgctccttccaatgcatacctgatgagagaataccgcctgtataccactaccgacatggtgaattggacggactgtggagcaccgctgaaaacaagtgatttcaaatggtcagccggagatgccagcgctgcacaatgcatagagcgggatggcaagttttattggtatatatcctcacaaaacagattcagtccgggttcatccatcggtgtagccgttgcagatactccttatggtcccttcagagatgcattgggccaggcattagtaaccaacgacatgactacagccgccaaacactcctgggatgaccttgaccctacggtctttatcgacagtaataaacaagcatatctctattggggaaacggggcttgttatcaggccaaactgaataaagatatgatatccctggacggctcaatcacagcactcgacatcaaagaccagaccgcctttgtgggaaggttcacagaggcgccctgggtatataagcgtaacaacctgtattatatgatttatgccgccgaattcccggaatccatacattattcaaccgcccggaccgcagaaggtccctggaaagcccggggagtcgtaatgccattggaaaaaggaagtaataccaaccatcccggaataattgattttaaaggtaactcctacttcttctatcataatgatgcgctgcccggtgggcacagttattgcagatcggtatgtgtggaacagttcacatacaaccccgacggaaccataccgcaaatgcacatgactaatgaaggtataaagaaaggaacaggtacactcaatccatacaaacgaactgaagcggaaactatagcatgggcacaaggtgttacatctgccaccgataaagaaaaaggtgtatatataaccgctattcataataccgattacatcaaggtgcgtgatgtgaacttcggacagaaaggtgcttcgcaattcaccgcttccgcatccagcagatatcatggaggagaaatagaactaagaatcgactcacccgaaggtgaagtgatcggcaccttaaacattccctataccggagaatgggataattgggaacaacactctacccatgtgaagccggtcaaaggagttcatgacctataccttatatttaaaggtaaaactccccacgagcttttcaacttcgattattggatgttctccgaaaagtcctcaaattaattaatttattctatttattatgaccatgaagcatatattctctatcatcctcggcctgatggcattctgccagttacaagcccagtcgtggacagccgacaacggcaacggtacttttaccaatcctctgttttacgatgaatttaccgatcctgacctgatacgtgtaggaacagattattacatggttgccagttccatgcatgccatgcccggactaccgctactacgttccaaagatctggtaaactgggagttcgtaacatatatctttgacaaactcgatttaggacctgattttcatctggaaggcgataaaggcatttatggaaacggaatatgggcacctgccatccgttatcacaaaggcactttctatgtattcgtcaacgtaaatgaccatggcttacaagttttctctgccaaaaatcccgccggcccctggacacacaagaatatgggtggcagaatttacgacctgggcatattgtttgatgacgacgacaagatatatgcagtacatggttacgacgaagtacatctgattcaactcaaacctgacttcagcggctatgtggaaggcagtgaaaaagtaatcatccctaaaggtaatgccatgggagaagggcatcatttctataaaatagacggaaaatattatatcatcagtgcagactatgcacccgtaggccgtatgcaatgtgcccgcgccgacaaactggaaggtccttacgaaaccgtggttatcagtaatcgtgaaaccatgggtacacaacgtggctggtggaccaaaggatatggcttctggtcgaacatccccaatgaaggagaagcaatggaatttgagcgcccttctgaaaatggtttcggtgcagtaacccttcatcagggaggcatcgtcgatctgcctaatggtgaatggtggggattctcaatgatggacgtaaaatccgcaggccgcctgactttcctttcacccgtgacctggaaagatggttggccctacttcggactggaaggaaacctgggacgctcaccacgcacctggttcaaaccggataccggaacggatatagctcctctgacgacttatcagcgtgatgatgatttctcgtctgccaaactaaaaccgatctggcaatggaaccatattccggtagataagaaatggtcgctcactgagaaaaaaggtgtactgcgtctgcacactctccctgccaaaaacttcatgtatgcgaaaaatacacttactcaacgcgctatcggtccggagtccagcgccaccgtcgaattaactgccaaatccttaaagaaaggtgacgtagctggacttgggttattgaatgttccctattattggatcggtgtagtgcgtactgacgagggattcatcctgagattttacgacttagtaaagaaccagtctacagacgaaccattatccggcccacaagtgtacctgcgtgccagtggtgattacaatagagacctggcaacactcagcttcagtacagacggtaaaacatttaaagaagtcggcggcgaactgcgtctggggtatcaaatgaagactttccagggagtacggtatgccttatttgctttcaatacgaatggaaaagcgggaggttatgccgacttcgacaatttcaaggtaaaagaaccactggcagatcgctctaaaaatcttcctctcggcaaagtaataacactaaccaatctcgcaaacggtgagcaagtctgggctaatccccacggtatgctgaatcgttcctatccgggaagtaatacgttcaacggtaccggatgccagttccgtgtacacgaccgcggacaaggacgtatagctcttgaagcattagacggatcaggctttgtcaccgtcaccggagccggcctctcagcagatgttcgactcatgcagaaagaaacggaaggcagcctcttcatgtggcaggatatgttatggggacaatgtatgctactatccttaaagaccaatcgtttcattggtttagatccgcgtacagacgaaccttattctgccgactggcccgggactatacccaaccgtaaaaacgggactgtgttttcctggcaggaaataaaataattgcatatattctccgatttatgcataaagcacagcattcatagtataaaaagtataaaaattccctctttaatgcatattctttccaaaattattgctacttttgcgccattcttagaataattatacagaacaatgaagaaaaaagccaatcggttagacgctatcaagatgattatctcaagcaaggacgtcagttctcaggaagaactgctgcaagctctgagtaaagaaggctttgaactgacacaagccactctctcccgcgacttgaaacaactgaaagttgccaaggcggcaaacatgaacgggaaatacgtatatgtattacccaacaacatcatgtacaaacgttccaatgaccaaagtgccagcgagatgctgatgaccagcggattcgtgtccctgcaattctccggtaacattgccgttatccgtacacgaccgggatatgccagcagtatggcctacgacatcgacaaccgcgaatgtcccgccattctgggcactattgccggagacgacaccatcatgttggtagtgcatgaagccgcttcacatggcgaagtacgcgaatttctgtcgcaaatcattccgaacattaaataaataaagaacgaatcaataagaaatggataccaaaaaagtggacgtgatggtggctgacgcctctcacgaagtttatgtggataagattttggataccatcagagaagcggccaaagtacgtggaacgggcatcgcagaacgcacacacgaatatgtggcgacaaaaatgaaagaaggaaaagccatcatcgccttatgcggagacgtgtttgcaggcttcagctacatcgagagttggggaaacaaacaatatgttgcgacttccggtttgattgtgcatcccgactttcgcggtattggattggctaagcgtatcaaaatggcatctttccgcctggcacgcttgcgatggcctaacgccaaagtattcagtctcaccagcggagccgccgtcatgaaaatgaatacggaattgggatacgttcccgtcactttcaatgaactgactgatgacgaatccttctggaaaggctgcgaaggctgcatcaaccatgatatattagtagccaagaaccgcaaattctgcatctgcacagcaatgctttacgacccggctctgcatgaagatgataaaatttaaaaaacaaaggatatggaagaaaagaaaaaagtagtagtcgcattcagcggcggtcttgatacttcatttacggtaatgtaccttgccaaggaaaaagggtatgaagtgtatgcagcttgtgcaaacaccggtggtttcagccccgaacaactgaagacaaacgaagaaaacgcctataaactgggcgcaaaagaatatgtcactatcgacgtgacgcaggaatattacgaaaagagcttgaaatacatggtatttggtaacgtgctgcgtaatggtacctatcctatttccgtaagttccgaacgtatcttccaggcacttgccatcgcacgctatgccaacgagatcggtgcagatgctatcgctcacggttctaccggtgcaggcaacgaccagattcgttttgacatgacattccttgtattggctccgggcgtggaaatcatcacactgactcgtgatatggcattgagccgccaggaagaaatcgattatctgaacaaacatggtttctcagcagacttcaccaaactgaaatactcttacaatgtaggtttgtggggtacctctatctgcggtggtgagattctggattccgcacaaggattacccgaaagcgcttatctaaaacactgtgtaaaggaaggcagcgaacaactccgtcttactttcgaaaaaggtgagttgaaagctgtgaacgatgagaaatttgatgatcccatcaaagccattcagaaagtagaagaaatcggtgccgcttacggtattggtcgtgatatgcatgtgggtgatacaattatcggtatcaaaggccgcgtaggtttcgaagctgctgctccgatgctgattatcggtgcacataaattcctggaaaaatatacactgagtaaatggcagcaatactggaaagaccaggttgccaattggtacggtatgttcctgcacgaaagccaatatctggaaccggtgatgcgcgacatcgaggccatgctacaggaaagccagcgtaacgtaaacggtacggctattctggaacttcgcccattatctttctctacggtaggtgtagaatcagaagacgaccttgtgaaaacgaagttcggcgaatatggcgaaatgcaaaaaggctggacagcagaagatgcgaaaggtttcatcaaggttacttctactccactgagagtatattataacaatcataaagacgaagaaatctaaaaagcctatcccctaacccatctctcatagagaacggttaggggatagaacaattatacgaacagatatggataataataacaaaaaactaactcgctcacgcagcgacagaatgcttgccggcgtctgcggaggattggccgcttatttcggactcgacccttcactcgtacgtatcggctatgcgttattgacgttttttaccgtatttgccggtatccccgtgtaccttataatgtggcttattgttcccgaggaaaagaacttgtataacagataaaagaataatagtataaactaacatgattaaagtaggaatcatcggcggagccggatatacggcaggtgaattaattcgtttgctgatcaatcatccggaagcggaaatcgtattcatcaacagctcaagtaacgccggaaacaaaattaccgacgtacatgaaggattgtacggcgaaacggaccttgtcttcaccgacgagttacctttggacaaaattgacgtgttattcttctgtaccgcccatggcgacacgaagaagttcatggagagtcacaaccttcccgaggaattgaaaattatcgacctttctatggactaccgcatcgcttctccggaacatgactttatttacggtttgccggaattgaaccgtcgcgctacctgcaaagcaaagcatgtggctaatccgggttgctttgccacttgtatccaattgggattgctcccccttgccaaacatctgatgctgaacaacgacatcatggtgaatgccattaccggttccaccggggctggtgtaaaaccgggatcaaccagtcacttcagttggcgcaacaacaacatgagtgtttacaaggcattcgagcaccagcatgtacccgaaatcaagcaatctctgaagcaattgcagaacagttttgatgcggatattgactttatcccttaccgcggtgatttcgcacgtggtatttttgctaccatcgtagtaagaactaaagttgcactggatgaaatagtccgtatgtacgaagaatattacgccaaagactctttcgtgcatatcgtagaaaagaacatcgacctgaaacaagtagtgaacaccaacaaatgtcttctgcatttggaaaagcacggtgataagctgcttatcatctcctgcatcgacaacctgctgaaaggtgccagtggtcaggcagtgcacaacatgaatctgatgttcaatttagaagaaaccgttggcttgcgattgaaacccagcgccttctaagtaatttgtattttgtaatttagaattaaagaaatgaacttattcgacgtatatcccctttttgacatcaacattgtcaagggaaaaggctgccacgtgtgggacgagaacggtactgagtacctcgatctctacggcggacatgctgttatctccatcggtcatgcacatccgcattacgtggagatgatcagcaaccaggttgccacgttgggattttattccaactctgtgattaacaagctacaggaacaggttgctgaacgtctgggaaaagtttgtggttatgatgactactccttattcctgattaacagcggtgcagaagccaacgaaaatgctttgaaactcgcttcgttctacaacggacgtacacgtgtggtttccttcaacaaggcattccacggacgtacttcacttgccgtggaagtgactaataatcccaaaatcatagctcctattaatgactgcggacatgtcacttaccttccgctgaacgatattgaagctatgaaaaacgaactagcaaaaggtgatgtttgcgcagtaattatcgaaggtattcaaggtgtgggtggtattcaattgccgacagatgaattcatgcaggctttgcgtgaagcttgtacagctcataatacgatattggttctggacgaaattcaaagcggttatggccgcagcggtaagttcttcgctcatcaatataatggtatcaaagcagatattatcacggtagccaaaggcatcggtaacggtttcccaatggccggtgtacttatcagtccgatgttcactccggtttacggacagttgggcactactttcggcggtaatcacctggcatgcagcgcagcgcttgctgtcttggacgtaataggtcaggaaaatctggttgaaaatgcagccaaggtaggtgagtatctgatgacggaattgaaaaagttcccgcagatcaaagaagttcgcggacgtggtctgatgatcggtcttgaatttgaagaaccgataaaggaacttcgtctgaaactgttgaaagaacaacatgtatttaccggtgtcagcggtacaaatgtactccgcctgcttccacccctctgcctcagcatggaagaagccaatctcttcctcgaacgtttcagaaaagtactttaaagtatatttgataacataatcagcaataaacaggcagccttcaagcgtttcagcgtttcttaaggctgcctgttgttttaaatacacaagcactttttttacatcaattaggttagaaaggtagaaaaaatatctacctttgcccatcgacaacccttttaataacagaatgatatgagaacagcaattatcggagcaggaaacatgggcggctctatagcccgtggattggcaaagggaagtattatccccgcctcggatatcatagtttctaatccctcacaaggaaagttggatgaactacaagcagagtttcctgctttacaaatcacccatgacaatcaggaagccatcatcggcgccgaattcatcatactcgctgtgaaaccgtggcttatcaaaggtgtgctgcgcgaactgaaactgaagagtaaacaaattatcatttctgttgctgcaggcatcaactttgaagaactggctcactacgtacccgaaccggaaatgaccatgttccgcattattcctaacaccgccatcagcgagatggaaagtatgacactgattgccagtcgtaatgcgaccaaagaacaagaacaactgatgctggatattttcaatcagatgggacttgccatgctgatccccgaagaaaaattcgcagcctgcacttccatggcttcctgcggaatcgcttatgtgttgaaatacatccaggctgccatgcaagccggtatagaaatggggatttatcccaaagatgctatgagaatggtggctcaatcggtaaagggagcagccgaactgatactgaataatgatacgcatcccagcgtagaaatcgataaagtatgtacccccggcggtattaccatcaaaggtatcaatgaactggaacatgacggttatacatccgccatcatcaatgctatcaaagcaagtaagcaataagactaacaattaattcattaaataaacaaccacatggacgaacaaattaagcaaatagcagaacgccttcgcgggcttcgtgatgtactggagctgaccgctgaagacattgcccgtgaatgtgacatctctccttacgactaccgtcttgccgaaacgggagattttgatatctccgtaagtatgttgcaaaagatagcacgcagatacggagtttcattggacgcactgatgtttggtgaagaacctaaaatgagcagctacttcctgactcgtgccggaaaaggcgtcagcatcgaacgtaccaaggcctacaaatatcaagccctcgcttctggtttcatgaaccgtagcgtagacccgttcattgtaaccgttgaacctaaaccggacgatgaaccgatacattacaacagccacgccggacaagaattcagtcttgtgctcgaagggcgcatgatggtcaacatcgatggcaaagagcttatactaaacgaaggagacagcctgtacttcaattcaaaattgccgcatggcatgaaagcactggatggaaaaacggtacgattcctggcaattatcatgtaacaactaaatggagaatgaagggaatctctcattcttaattcctataattatggtagaaagatttttatcacaaacctctttcactacacaagaggactttatcaaaaactttaaaataaacgtaccggaaaacttcaacttcggatacgatgtagtagacgcctgggctgccgaacaacctgacaaacctgcattgttatggactaatgataagggtgaacaccggcaatttacgtttgccgacatgaaacgttatacggacatgaccgcctcgtatttccaaagcctcggcatcggccatggtgacatggtaatgttgatattgaaacgccgctttgaattctggtacagcaccatagctttacataaactcggtgccgtcgtcattcccgccactcacttgctgacaaagaaagatatcgtgtaccgctgtaacgctgcggacatcaagatgattgtttgtgcaggagaatcggttatcacggatcatattgtagctgccatgccggattcccccagcgtgaagaaactcgtcagtgtaggtccccaagtagccgaaggattcgatgatttccacaaagggatcgaaaatgccgcacctttcgtgaagccggagcatccgaatacgaacgaagatatctcactgatgtacttcaccagtggaaccaccggtgaaccgaaaatggtcgcccatgactttacatatccgttggggcatatcgttaccggtagtttctggcataacctgacggaaaacagcctgcatctcaccatcgccgataccggttgggggaaagctgtatggggcaaactttatggacaatggattgccggagcaaatatatttgtgtatgaccacgagaaatttacccctgccgccatcctggagaagatacaggattatcacgtaacttctctctgtgcacctcccaccatcttccgtttcctcattcacgaagatctgacaaagtacgatctctcatcactgcaatattgtaccatcgccggcgaagctctgaacccagccgtatttgagaccttcaagaaactgacaggcatcaaactgatggaaggattcggacagacagaaaccacgctgaccattgctaccatgccttggatggaaccgaaaccgggaagtatgggattgcctaatccacaatacgatgtagacctgatagacaatgacggccgttccgtagaagccggtgaacagggacaaatcgtaatccgtacagacaagggtaagccactgggattgttcaaagagtattaccgcgatccggaacgtacacacgaagcctggaacaataatatctactatacgggagacgttgcctggaaagatgaggacggctatctctggtttgtaggccgtgccgacgatgtgatcaagagttccggttaccgtatcggccccttcgaagtggaaagtgctctgatgacacacccagctgtaatagaatgtgccatcacaggcgtacctgatgaaatccgcggtcaggtagtgaaagctaccatcgtactggctaaagaatataaagggaaagagggagaagcacttatcaaggaattgcaaaatcatgtaaagaaagtgacagccccttacaaatatcctcgtgtgattgaatttgtagacgaactgccgaaaaccatcagtggaaagatccgtcgtgtggaaatccggaagaacgatacgaaataagaaaaaaatatgaggaataagctacttctaaatcgtttgcaccttttatgttactttttgatcgatttgagctattcggtttcccgcaaaccacttacatttgcgaccggaaagtacaactaaaaagtttaaagcacatgattacaagtagaaagatttctcagattaacgttttcgcaggtagcccctgggaagtggaaagtgtgaagcaattgctgaagtcagcttacatcaccgcttcaacagaggacaaaggtaatggcattcacgtgtctgtgccttgtcagcagtacactgccgccatgcgagttatcagtaaccgaaaggctttataagactgaaaagaaaacgaagtgaaaaaggactgccccttggaagaaatttccgaaggggcagttttttattcattagtataccgcttctccatgataattctcccttcaccgccttccttgtgtaaaggaacagaaaatcaagtcattccccgtcaacaagaagttaggagtttgtcaacaggaagttaacttcttgtcgacaaactcctaacttcttgtcaacaaaaaaccaacaatttgtaaccatcaggaaaacagcgacatagcatctctttatagaagattaaattgtgtactaatattacagtcgtgtcttcgcaaagtgaagttcattagcttgagctcaagttgcaaatacgtagcaaagtgaaacaaacaggagaaagcattccattattatatagaaaagatgtatttacattcttcttgtatctgaaatgaataaaataaagtaatattgatcatttcatttttgtacacttcttttctttaatacactgacatatataatattacccaaaagaagtgtacaaaaataaaagggccaaaaatggcatttagacacttaagaccgcaacacagatttgtatacagcaatttgatatgagcactacggcaagagggtgtatagacactctttatctgcctttcactctcccactatacatacaaaacgtccagtccggagacaagtcactccacataattcattaattaacagcacattactctaaggtttgaatttgagtaaaaaaaaaaattaaatcagtaaaacgtattattttaatacgcatagatttgcgacgttaattttaatttaaacattatgaaagatgtaaaaacattaatgagagattggaacaaacatcaatgcttgatgtttttcctatgctttttctttttgtctgcaggattgtcgcaaagggtatatgccgtccagagtatcgcaatgggcattgaccagcaactgcaaattaccggtgttgtaaaagacaccaacggtgaacctatgattggagtgacagtaatggtaaaaggaacggggaccggtaccatcacagacattgacggcaagtatagcgtatccgtacctggaaacaagagcgtactgacattctctttcgtaggatatactactaaagaagtgaccgttggtaatcagaagagtataaatgtcactctatccgaagactccaagatgatagacgaagtagtagtcatcggtttccaatcacagaaaaaagggaatctgacagcttctgtagcttccgttggagcagaagcattggaaaacaggccggttgccaatatcggacaagccttgcaaggcatggttccgggcttaaatatcagtatcgaaggtggcgacccaaacaaagttccttcattgaatatccgtggtgccactacttttcgccagagaggcacatctaatgatgacaagaacaagttcgatgtgaaatccggctctccactgatcctgttggatggtgtggaaatcactgctgaagacttgaatcagttgaatccgaatgacatagacaacatgtcgttcctgaaagatgcttccgccgccgctatttatggaacaagagccaccttcggcgtgatactggtaactaccaaaggaggtaattacaatcagaaagcgaaaatcgactactcttacaatttagctttcgatcagccttatgaattgcctgacattttggattcatactatatttataaagcgttaagggacaaagaagtttggactggtactatcgctgagtattcccaacacgacagagacatgttggatcacatgatggcctacatgaaagatcctgtgaacaacaagccttattttatggagggggatgccatacaatgggtaggcaacacgaatccttacaaagagttagtgaaaagctggactccgactcaaaagcataacctctctatcagtggtggtggtgacagaatcagttattatatctctctgggtatgcaagaccaaaaaggtatgtatgaaattaaaaccgacagattaaaaagatacaatgccatgctcagcattaacgccaaagttacgaagtggttcaatgtagctgccaaagcctcatacaatgtgttcgattatgaaggtcctacgcaacaaacagatggtatgaacctttggagttatgccaaatcctactatccggagaactttatttatcaacctgtattgacaggaccagacgattttctaccgaatcacccgacagaaaatcccgtaagctatttgtatgcgggcggacgtaatatcagttccagacgaaaaacaattctttccatcagtcccgagttcacaatcatccccaagatattgaaaatcaaggcggatctatctgtagctcccactacttaccaaaaagaaaagactcatccgaaacaggcgcgtgtaaacaattcatggaccgctctcgaaactcgctgggcaaccgaaaatacgggtgaagtcacacgttctaccacggatagatatgctatcaacgtgtatgcggattataaccaaactttcaaggaaaagcacaatgtttccgtgttattaggccttaaccaagaagaagaatcttatgccggttctactctttacctgaaaaacatgctcgatccgtacatcctgaatcccgagctggtgcaagatgttacggcaaacacctctgccaattctcatcatgaaattgcttcacgcgcattgttcggccgtatcatgtacaactacatgagcagatatttgatagaactggatgcccgttatgacggtagttccaagttcccgaaagattcccgcttccagttcttccccaccgtatcattgggatggagagtatcagaagagaagttcatggaatggtcgaaagactggctggacaacttcaagatcagggcctcatggggacgtttgggcagtcagcccgattcggaatacccatatcaatccgttttcagtacttcagagggatatttcttgtttgatggaacacgttaccctactggtatcaatactccttcattaatcaatcctaatttgacttgggaaaaatcgactaccaagaaccttggcttcgactttactttcttgcagagccgattgacattcaccgccgacatattcgagagaaaagtgaccgacatcctgataccgggtggaaaggattacccggcattgatcggtgacgatgacttgcccttcgagaatgcaggtatcttgaaaaccaccggatttgaactccaggcaaaatggtctgacaaactggctaacggattccgttatagcgtaggcgtagcactctcagatgataaggccaaagtggtgagctacccttccaaccctacgaataagattggtgacggtgtattgtataagggatataccgtaggagatatctggggatacgtgaccggaggtatccttcaggaaggtgacttcgacggtgtaggcgcaaatgggaaaccgctgtatcatggcccctatttcaaaggcggacaggcttatccgggctacatttggtatcaagatttggatcacgacggcgtcatcactaccggcttgaataccgtagacgatccgggtgacagaaaagtgattggcaacaatgcaccacgctatcgctacaacatcaccgccaacttccagtacaaaggattcgatctcgatctgatgttccaaggtgtgggcaaacgagactattggttgtcgtctacttccagttattggggcaacggagccggttcatgggaagtatacaacaactcgtggactcccgaaagaacagatgcaaaattcccgatgtatggttccggtacaggcagttacgcccaaacaggttatttgcttgatgcttcctatatcaaattgaaacaagtgattctgggatatacattcccgagagctttaatcaacaaaatcggtttggagaaattgagattgaatttagccgcctataatctgtttactatttcggctatgcccaagtattatgatgctgactatctctccgatgcgtatcctccgaaacggacattcagcgtaggtattcaagtaggtttttaacgttttaaatcaatagagattatgaagaaatattcaattatagctttacttgtgaccttggtggcatctttgtcgtcttgtaatgacgacttcatgcaacgagatccgatagatgacatggctgacggtacattctttacaaaagaagccgacttacagctgtacttggacggaatttacagatattatgtatacggacatggagtgagtggaaccaacaatacctcgcacgataaaggtttcttggcggtaaaggcaggcagccagattatttttggagatgcattcagcgataatactgtatatgcgggtaatatcgatgctaaattaggcggtacttatgacactccgaacacagcatcaaagaattttgatgcgccctggcagtgggaaaaacttcgcaaggtgaactacttcctgaatcattatgcggaagtaggggatccggaaacattgaagaaatatgcagctcaggcctatttcttcaaggcatgggactattacatcaaactggtggctctgggtgaagtgccttggttggataaggaactggatacaagttcaccggaactctacggctcccgcatgccacgcacggaattggttaccaatatcctgaagtgttttgactttgccattgaaaatttggaggataacgacaattcctgtggatatatcaacaaagatatggcattattcttaaaagcccgcttctgtttgttcgaaggaaccttccggaaatatcatacagaattgaatctgcaatctacagccaacgaattattgggtatgagtcgtgatgctgcctggacgattatcgagaagaacagatactcccttttcaaacatcctacagcaaaagattcttattggcaactgttcgtacaaaaaggttctcccgaaactgagggtaacaacgaaaccatcctgtcacgtgtatacgacggtgttaaacagggacatgacaatccgcgttattggggaatgaacaaccacacacgctattgcatgggtgctcccgtaactatgctcgaagactatctgtgcgaagacggacgtcccatctatataggaggtgtggaaggcagctacgaggtaaaccctctgttcaaaggatatgacggaatgtgggaggagttggacaaccgtgatccccgcttgacgcaaactgtttgcagaccgggtgaatatgcgtccatctttgatgcggacgataatacatattctttggaagaatccggtatcatttatccaatgattacgtatgatacaggtggcggttctccaatgaaaaagtacaattcaacggtaaccggctatcgattcatcaaacactggatgcccgattacgctgaatgggaagctaacccaaaaggtgtgcaaacagcccacatgttccgctatggagagttgttgctgatttacgccgaagccagagcggaattaggtgaaattaccaacgacgatttggagatcaccgtcaatgccttaagagaaagagccggatttgattttgccaaataccccaatgccaagctgactctaaccaacatacctgctgacccacgtctggacgccatctatgcaaagtatctggattattccgttactccgataattcgcgaaatcagacgtgaacgccgtgtggaaacaatgatggaaggcatgcgctacgaagatttgatgagatggaaagccggtaggctgttcacggtccctgtaagaggaatgaagatgacgcaggagaaaatagaattgtacagcaaaaaccgcaacgatgaagtatataaggattatccctacaaagtaacagttcctataggagaggtaggtaataaggtgattgtagacgatgacggtttcatcattccttatcctacatcaaccactgttatcaaaggcgtgcgaccttgggatgacaaacgttactattatccgatccctttaaacgagatgcttatgaatccgctgctgacgcagaatccaggttggaaagacattaatagataaccgataaatatagcgtaagatcatgaaaaaaaatatatatttcttagcaggaatgctttcgttcggggcactgtttacgggatgcgacgacgatgactttggtaaagcggtgaccattaccgttgaaaatgcaacaaaccttgaaagcgatgttttcggggtcgacgtgacggaaggacagcccgtgcaactgaaaccgttcatcatgcccgaaagtgcgagagaaaatgccgtcagctaccactttgccggagagccttcgggtgccatcgacttaagcgcggacggcttgattacccctaaactgaccacacctgccgaaggaaacattccatttccgttgggtacggataccattattgtaagagttgacgacggttcgggcacatttgtcagatacccgatcagagtaatcagtaagatagtacttgtttcgagtatcacgattcagtctgccggacagagtgtggaagtggaaaatggaaagaccttcaatttggcccagtatgtaaccattaatccaaacaatgctaccgacaagagcgtcacttattcttctgcagatgaaactgtggctacagtagaccaagacggtttgataaccgtaataggagaagtgggacaaaccaccgatatttatataaccgccaacgacagagggaaacaaacggctacttgcagagtaaaggttgccgcagaagctcctatgtatgtaggcttccccttctcggacaactggaattactcatccaatctgggaaccaaggaaggcgacatgaaaaacctgttcgatgataagaattcaacattctgggcacccgaaatcatcactcgtcccatttatgatccggtgtgctacttggatctcaatctggggcaaatcatcaaattcggtcaattaggttacaggcaccgtaatctgaattattctcatctgcaatgtcacactttcaaattagaagccaaaaaggtggaaagtgacgcatggacagatctaggcgaatatgtaacagaagccttgaaggtggatgattaccagttgttccaagttgaacctacggaagcccaatacattagaataacctttatcaaagggcatctgagaagcggctatacagactgggattactcagaaaccggaaacgtttccgtgggagacttacaggtattcatttacaacagataattacttttgttaaagtgtcgagggaaatcttattatgagatttccctctttcttcaacgataataatttcttataaaatatttccgttttctttcttgcacattcaaggttttcttgataacttgccattatatttttcagaatccgccgaataatctttaatccgatagtttatgtatgaaaagcaaatacctattactctttctggtcttcatttatcaagcatcagcttcctttgccactgaaaagtataagttcagaaccatgtcgcccgatggagggttctactatgatggaataaaggcgatagagcaagacatagaaggttttatctgggtaatgatggactacgagctctaccgttttgacggctatcactataaaaagtactatccttattttgcctcgattgccccaacaaaaagatggatattcaacaatatagcatccgacgcctccggtcatctatatgtaaatacaaacaacggactataccgttataagcgcatctcggataggtttgagaaaatatatgatgcggtttctcaagtgaaggtcgacaaagccgacaatgtctggatcagatctaaaaacaaatggagcatattggattccaatacaggagaagtcaatacgccttactatgacgagaaaattcctgtttatagtaatccagttttctgcctccacaaccaggacctatatacattcatttatcgggaaatttaccgttacaattatgcggagagtaggtttgttctctgtttcacgctccccaatacgggcagtggttatattcgctttgcccagacgcatatgggaaagttatgggtatttattgataaagatggattatataagattgacttgtcatctttcaagattgaagaccattataaacctctccctgaatatgacgacagctcattgcgagcatttcatgtggacaagaaagggaatatttggttaggaaccataaacggattgtacatactcaatccgtcaagcagagaactatcactttataaacattccggaacagaccccttcagtctaccgaacaattccatttgggaaatctatgaagacaggcaggacaatgtttggataggcacctattcgggcactttatcttatgtaaacgtaaatgaaaaccatgcgttcagaacttatcacacccagaacagcggtctgaattatgctccggtaagcgcgttcgccgaggagcaggactatatctggataggtacggaaggtggaggcattaaccggatggataaagtcaacggagaaataagtggctttacactcccgaacaacgttacatccaagaatgtaaaatcgctggtgattgacgccggacgcaatctatggatttcgacattcaggggcggactggatctttatgattccagacagaataaggcaatcaattacaaacattccaaaaaggattcctgttccttgctggtagatgatatccgaaagactgttcttgaaggagactcgggtatgtggatatcgtatcagtatcacaagcctgaaatatcctatttttctttccacagcaagtcgttcacccatttcagcctcgatagcatacacgattacgcctacttgttcgacatcctgaggcaaggagagaagacactatgggctatcagcaatgaggccctctatcagatggacacgcacacacgtgccgtggaaaagatcattcccaatgattccacatacctgggactgtttactttctgcctggacgattccggcaatatctggatcggcaccatcggcaatgggcttattaagttcgacaccaacacctcgcacttcatctcgctgaaaaatgtattgcagcaggacatctactccatctacagcatttgctatgacaacgggaatgtgtggatgggaactgacaacggtctgttttgctataacatagccgacaaccagctgatgagattcgacaaaagggaaaatacgcagggacaagtttactacccactggcatccatgaagggaagagacggattattgtatttcggaggaacaaatggctttaccgtcatcaatccgaaaaacatctcgtacaacagttacaagcccaaagccattatatcagatttctttattgaccaccaagcggttcatcccaactatacactcaacgatacacttaattgtattatccttgattatgaccaggtaaacttcggttttcaattttcttccgacaattatcatatccctgaaaaaaaccgcttcaaataccggctgaaaggatatagtgattcttggatcactacaaatgcacaacagcgcacagtcatgtactcgaaagtacctgccggtacgtattactttgaagtctacgctgccaacaatgacggtatctggagtgacaagcccgcggtgataaaagtgataagaaaagtggccccgtgggttagtctgccagcatacttcctttatgtgctgacggtaataggaatcacttacctgatgtatcatcactatgccgaaaagaaaaaactggagatgctgctctaccaagaaaatatagaaaaagaccaaaaggagcaaatacatcaggcacagctacgattctttaccaacatatcacatgacttccgaactccactatctcttatccttgctgcactggacaaactgagacgtgaaggattgaaagaatattattatcgtatattgaacggcaacgtgcaacgtttactgaatttggtaaacgaactgatggattttagaacagtagaaaacggtatgatgaaactggaattgcagccactggacatcaaccgtttcataaaagaaatcgccaatgacttcatcgactatgcacggcagcgaaatatcgacttccagatactatgcgacgaaagcatgcccactgacgtttatatagacaaaaacatagtgaaaaaaattgtcatgaacttgttaagcaatgctttcaaatatacgcctgacaggggaagcattattttagaaacacgctgcaggaaagcttttacatccttgtataagaacagctacaccgtaggcgaaagcacgaacgatgtcttttctatcatcgtcagtgatacgggagtaggcatatcccgagagtccataagcagtgttttcgaacgtttttataaggtaaatacagtaaacgccgactcccacctgggtacgggaataggcctggcacttgtaaagagcttggtattgttacagaaaggaactatctccatccacagtgagcgggaaaagggcacggacatgattgtatacttaccgcttgacagcagtatcttcaacgaaactgatttcatgaaacagaaggaaacgacacaagaaactatcatggaaattacagacaaagaagccctgcctgtcgatattaaagatatgggaagcgaattcatgcccgcaaacaagaaaaaaatattgattaccgaagataatgatgacctgagggtattaatcgccgaatccctatccgatgaatttcaggtgatgcaggcaagagatggtgttgaagcgctgaagttgatagaggatgtagattttgatttggttataagcgatatcatgatgcctcacaaagacggggtatctttgtgcaatgacatcaagaaagacatgaatacatcacatattccggtcattttactgacagccaaaactagtcttgaaagcaagatcgaaggagtggattcgggtgccgacctttatttcgaaaagcctatcgatttgacctatctaaaattgtccatccaaaacatattcagaaaccagcagcagttgaaggaacattatgccaagaattattatgcggacagcagcgagctctcttccaacgagcaggacggtaaatttctaaaacacctgattacttttatcgaggctaatatggaccagtctcaaatggatgtcaatcagattgccgaggaattgttgataagcagaagcaaactttacacaaaggttaagagcctgaccggaaagtctgttgtagaatttgtattgaattgtcggttacgcaaagctgccagattgattattgaggaaaatctgaccatgagggaagtgatgatgcaaataggtatagaaagtcaagcctattttaccaattcatttaagaaagtatttggtgaaacacctacatccttcgccgcaaagcacaaaaagttgtccaaaggcgatttagataaaacaaatggcaaatagagtaaaacaaggaaagaggaattgccttcctttgcaaaaacttataaatttaataacatgaaaaagattttgcaggtaaccattttgttttccttattgactgtcggttcgtttgctcaaaagcaacaacaaatattaccggccgatcaggaaattcctttaaaatacggtgccgatcgtttaggtaaacgttcagatgcagccatgaaaaaattccgtgacaacagattgggagctttcatacattgggggctttacgccattcccggaggagaatggaacggaaaaatgtacaatggagcagccgagtggttgaagtcgtgggccaaagttcctgcagatgagtggttgaggctgatggaccaatggaatccagaaaagttcaatgccaaagtttgggcaaagatggctcgaaagatgggagtgaaatacgtgaaaatcacaaccaagcatcatgaaggtttctgtctgtggccaagtaagtacagtaattatacagtggctcaaaccccttataagaaagatattttaggcgaattggtaaaggcctacaatgatgaaggtattgacgttcatttctacttctcggtgatggactggagtcatccagactaccgatatgacatcaaatcgaaagatgatgaagttgcttttgcgcgtttccttgaatttacggacaaccagctgaaagagcttgctacccgttatcctaccgtaaaagacttctggtttgacggcacatgggatgccagcatcaagaaaaatggctggtggacagctcatgccgaacaaatgttgaaagacctgttaccgggcgtaactatcaacagtcgactacgtgccgatgattacggcaagcgacacttcgacagtaacggacacttgatgggagattatgagtcagggtatgagcgccgcctacccgatccagtgaaagacttgaaagtaacccgctgggattgggaagcatgtatgaccttgcccgaaaatcaatggggatatcacaaagattggtcgttgagctatgtgaaaactcccttggaagtactggaacgcatagtgcatgccgtttcaatgggaggaaacatggttgtgaacttcggaccgcaagccgacggtgacttccgccgggaagaaaaagaaatggctgatgccattggcaaatggatgcaacaatatggcgagtgcatctacggatgtgattacgccggttgggacaaacaaccctggggatactatacccacaagggaaaagaggtatatatgattgtcttcaatcctccttattccaaacacttggtggttaaaaccccaaagggtacaaaaattctgaaagcaactgtgacaaacgggaaagaggtggcagtgacagaaaccgcccgcaatgaatacaatgtggatatgcccgcaaaagcccccgaaggtccctttgtcatcaaactacagatagaggaaaacgtaagttccgctgataaataccgtgatgctttgacttgattcttatttaatctgattatgttatgaaaaggctttctctttttatttatttcttcctgataacggtcctgcaagctgctgcacagcaaagctttgacaagactgccgtaaaatctgtcatgaaacgcgtggctgactggcagattgccaatcccaacaaaggagcagagcacgatgatttagactggacgcatgcagccctgtacatgggtatgttggactgggcagagctaacagaaaaagaagacagcgacgattcttattatcagtggttgctccgtatcggacaacgtaatcacttccagataggtaaatggatgtatcatgctgattttattgccgtcggacagccctttatcgacctttacttgaaatatggcaacaagaagatgatcgctcccgtcatggcacgagccaactgggtagtagaaaatccggctgaaactactttggaactggattacggcaaactcgaaactctggaccgatggtcctggtgcgacgcattgtttatggctccccccgtatatgccaaactatatgcgttgaccaaggacaaaaggtatctggatttcctgaacaaggaatacaaggccacttataattatttgtatgataaagaagagcatttattctaccgtgaccatcgatattttgccaaacgcgaagctaatggtaagaaagtgttttggggacgtggcaacggttgggtgttgggaggactggtcgaaatccttcaagctcttcctaaagatgaatcctcacgcacgttttatcaggacttatttgtggcattggccactcgcgtagccagcctgcagagtgctgatggatattggcatgccagcctgctcgatccagcgtcttacccatcgcccgaaacaagtgcaaccggttttatcgtttatgcacttgcctatggcgtaaacgaaggagtgctggacaaagccacttttatgccaaccatcgaaaaggggtggaaagccttattagatgcggtcgaaccagatggtaagttaggctacgtacaacccatcggagctgatccgcgtaaagtgacgcgggacatgaccgaagtatatgggacaggggcattcctgctgtccgggtgtcagatttataagatgaagtaaaataagttagatctatcatgaagaattatacattgtttttgtggattgctttgctaatgttaggtatatccggtacgataggtgcacgtgaggtagcatccttcaacgacggttgggaattcaagaaaggtccgttttccaaagaagcgttgcaggctgtacagaaatggaattcagactggcaggaggtatccatcccacatacttggaatgcggacgacatgcaaaagcaagcctccgctttctatgaaggtgtaggctactaccgcaaaaagttcactttccccgaaaatatggaaggcaagcgcatctttctacgcttcgagggtgtaggttcttatgccgaagtatatatcaatggctatctggcaggaacacacaaaggagcttactctgcttttgcatgcgagatcagctcgcaagtaaaattcggcaaggaaaacgaaattatagtaaaggcagacaactcttcacgtcccgatgttatccccacgaaccacattttgttcggtgtttatggaggtatttaccgccccgtatggctggttgttacggaaacttgcagcatcattgcaagcgactgtgcctctccgggagtgtatattacccagaaaaatgtttcaaagaagtcagccgaagtgactgtaaaagtaaaggtggacaatgcaaccttagctcccgtcccactggaactagagaatgcaatatacgacaggaacggcaaattggtaaagaaacatagtcagaatttcgaacttactccacaaggagtgcagaactattcctcacacttccgactgaacaatccccatttatggcaaggacgtgaagacccatatctgtataaagtcgtttcacgtctcatgcagaatggacgcgtgatagacgaagttattcagcccctggggattcgcaagtatgaaatcgtggcaggcaaaggattcttcctcaatggaaagaagtaccccatgctgggggtaacccgccatcaagactggtggggactgggtagcgccctcaccaataaagagcacgacttcgacttggcacaaattatggatatcggtgcaaccaccgtccgctttgcacattaccagcagtctgactacatctattcacgctgcgacacactgggattggtaatctgggcagagatccccttcgtgaaccgagtcagcggccaagagtgggacaatgcccaccaacagatgcgcgaacttatccgtcaaagctttaatcatccctccatctatgtatggggaatccataatgaagtgtatcatccgcatggttataccgccgcacttacccaatccattcacgacctctgcaaactggaggatccagaccgctacacggttgcggtaaatggttacggtcatgccgatcaccccgtcaaccaaaatgcggatatacagggcatgaaccgttacttcggttggtacgaacggaagatacaagacatcaagccatggatagagaaaatggaaaaagaatatccttggcaacgcctgatgctgacagaatatggtgcagacgccaatatagaacatcagacggaaatattgggcgatgcactgaattggacaagccctttctatccggaaacatttcaaactaaaacccacgaataccaatggagcatcattgcccaacatccttacatcatcgcttcttacctgtggaatatgttcgactttgcagtgccaacatcaaaaagaggcagtgtagatgcccgcaacatgaaaggcatgatgactttcgatcgtagaatcaagaaagattcttatttctggtataaggcgaactggagcaaggaaccggttctttacctgacacagcgccggaatgcagtgcgcgagaaaaaagagacttccattacagtgtattccaatatcggtacccccaaggtgtatctgaacgggaaagaattgaccggagtgcggaaaggttatactgatgtacattatatattcgacaaggtagtgctggacgatggcaagaatgtgctgaaagcatcccttctccatcaaggaaaagaatatacagacgaaatagaatggaattataacggagagtgcaaccgggaggctgatttcctggagcataagaaagagcatggtagttggtaattccataaagaaagaaattattattattactgataacattaaattaggattgaagtatgaagacttttaagaccttgctgttgggactttgcatcgtgatgtgtgcatgctcgacacaaactccccggcaaaccaatgagtacggcactaattggcagtgggaaaacgggaccatcgtaatagaaactcccgagcgtcccgccggccaaaaaagcgtgttgggactgactgtcccgaagatggaagtagtacgcgtaggattcgtaggactgggcatgcgcggtcccggtgcggtggaacgtttcacgcatataccgggtacacaagtcgtggcactttgtgattatgagcagtcgcacgcagagagatgtcagaaatacctaaagaaagcatccatgcccaaagctgccatctattcgggagagaaagggtacgaagaactttgtaaacgagacgatatagacttggtttatatcgctgccgattggctacatcactttcccgtagccaaatacgctttggaaaatggcaaacatgtagcgatcgaagtaccttcagcaatgaatctccagcaatgttgggacttgattaatatgagcgaaaagtatcgtaagcactgcatgattctagaaaactgctgttatgactggtttgaaatgaacacgctgaacatggcacagcaaggagtattcggtgaagtaattcgcgcacaaggtgcctacattcacaacctaagcccattttggaatcattattggaagaacggtgagaatgacaagctgggttggcgcttggactacaacatgagacatcgcggggatgtatatgccactcacggtctgggtccagtagcacaagcgctcgacattcaccgtggagatcgcatgaagacactagtggctatggataccaagtcagccataggtaaagcactggtagaagaaagagcagattccatttgtaataacttccgcaatggcgaccatactaccactctgattcgtaccgaaaacggtaaagttatagaaatccaacataatgtaatgactccgcaaccttacaatcgcttgtatcaacttacgggtactaaaggctttgccaataaatatccgatcagcggttatgctcttgatgctaaacagttgacagcttccggagtacagcccaagattgatgatttaaattcacatagtttcttgcctaagagtgagatggaaactcttgtagccaagtaccagcatccgatattgaagaaatatggtgaaatggctaaggaagtagggggacatggtggcatggatttcattatggactgccgtctagtttattgcttacaaaatggtttgccattggatatggatgtatacgatctagcagagtggtgttgtcttgccgaactcggaacactctctatggataacaactgtgccgccgtagcatttcctgactttacccgtggagagtggaatgttgtaaaaggttacaaacacgcttatgcaagtcctgaagaagaaaaagccgtagccgagaaagcagcagctttcacagccaaactgaaggaacaaggagaaaaagaatggggagaaactgagaatcaagaagcaaaatagcaatatagctgagaaaacgaagtgaaaagatatcgccccttctatttccgaaggggcgtttttttattcatcttaatataccgcttcacctccttcgggcttctcacgatattttatatcaaaacgtccttccttgatacttccaccactgaatgtaccactaataatggttccatccatacgggtaatataagcttcgccatcgcctaaatctccttcatcaagaacggcatctgtataagtacaagtagtaccctgacgaggattcacaagtaccaaatgcaaactactgaagacaccgactgcggcatcaatctcaacataatgattctcttcatcgtcagaaaaacgaacagagggtgtcccataccgtccactggcatatacccagccgtcaatcagacagcctaacgtatttgcccccgtagtcgtagcctccggcatcagtgtcggatcaacagttttgtcttcatcacaagcacaacaacaaaccaacaggaatagaaataacagttttttcataacgcctaaaaatgatagtttaaaccgaaaagtaaggataactgtccgaaataaccgctaccggctctcggactctccacatcccactccacattatgatacttcaccgaataagactcggaactggatgccagccagttcaccctggcagaagctccccaatgacttgacagaaaatactcacccgagagagacaagttacctgcaaacttactcatggtaacttttcgaggtttatcatatactgtactcttatcacgataaagttgatatccgattccaccggagaattgaagttgataatgcttttgcaccatagtcaaggctacctgaggagccatataatgcatatatatcttatctgccccagtatcatgtgtgttcttatacgcacttccctgatacagaaatcccagcccgaacttcagttccctacccgtaatctgtccaaggtagttgacatcccaggctacaccttttcgtaagtcactgcgataggtatctgccctatcagtaattcctacaaagcgccccaggtaccatgacggtccggcatgaacggaaaatgatgatcttttatcacctgcactttgagcgtataaagaggcgcttaataacaccccgacaaagaaagaaagcaagtatctcataatgatttgtatagcgtcttttccttataaatactcaaaaatcgaaagtactgcattcggataataactatttttaatcaaagttataaatccgcatcttcttcagctaccttttccgctctatatcctgtgtacgaaagaatgcctccgaataccgggctccccaaagttcatagcgttcaaattgcatttctactttacgggtaaagtttatccagtctttcttctctaacggcgaccatacattctcagccagtgccgacatccgcgggaagatggcaaactcagccttccaggttgtaggaatatattccgtccaaaggcacccttgtgcaccccatacaagttcttgttgctccgtagtcaacgaatcgggcacaatctgaaattcatagaccttctccaatgacaacgggccacgaggacctatttccgactggatacgactttccttcagattgaaatacgaccaggcagaacaggtaaatatagtacgatgattggtccgcactgccttttttccaaattcaggccgacgccagttcattacaatacaatcttcagaaatacctccttcaaggatctcatcccaaccaatcaacgttttacctttcgcgtttaccaccttctgcacataatggatgaaatagctttgcaatgccttttcgtctttcaactcatgttcacgcataaactgttgcgtctcttcggattcctgccaccagcgcttggcacactcgtcgccacccacatgaatatattgaccgggaaagagatcgcataattcagaaaacacatctttcaggaagtcaaagacttcaggttttggtgccagtacattattgaatttattgaagatcccccacgtcaatgctgcctttttaggttcattcggcgtagtactgaactgtggataagtggcaagtactgccatacaatgcccggggatatccatctcaggaatcactgtgatatgacgttcagcagcataacgtacaatttcgtgtacatcttcatgggtataataaccgccgtaaggtaacggttgatactttccaggataaagtccgaaaatctctccctcgcggatagaacctttctccgtcagttccgggcggcatttcatctcaacacgccaagcctgatcatctgtcagatgccaatgaaaatagttgagtttatgaagtgcaaggtaatcaatatactttttgatgaaatctacgggaaagaaatgacgtaccacatccaaatgcataccacgataagggaaacgcggataatcgataattttcagagtcggaaggataggcaacacacccgcacgggtgggcaataattgtataagcgtctgaacaccatagaagacacccgcctcatcatttccttcaatacgtacaccacctacaggggtaatctccaactgataacctcctggaatttctccattcttttgatttttcagaatgatacaaggttggtcactcggcttcgaaagtattgtttctacagcagacgaaagtttctttcgggatttacctgattttgggagatccacttgcaaggggataccgagatagcgctccatataatcagccagataggtagccgaaagtgccaacgttagttctgacatacgaatgaccgtattacgttgaatcaaatactctccctgtccggttacagttatctccaccggttcgggaataatgctaaaagttttctcctgtgcctgcccggcaagcgcagttgcagcgaaggttgcagccataattttctttaagtacatagatgatgatgtatattatattgcaaatataacccttttgcagaaagatgtttaagatttccaatctctttttgacgaaaaaagaaagtacaacattgaacacataccacactagtgtttaatgtataccatacaagtatttcatatctgtaacacaagtgacttatttgtaggatacaagtattacataagtaccttaattaataagccttccgtccatatagcaaggtgataaatcaatattgaaagagtataatttaatattatagaggcaaacaactcatttgcatcgtgaaaataaaactgaaagaatagcatccttcatttttctcactatacccttccacccgctaaggccgatgaataaggaagtgtagaagtgtggaagggaattaagttttcattgttttaagtcaataaattaaagaagtaccaaaacttatgcactataacctcacctactccttggatctcatataaaagtacttttgagtttttgacttgtaacaaaacacattaatagtagctttcatacattttccggtttaactcttggtttacatgaactgcataattcgtaggaaatgtgacttaatttaatgccaaaggaaagttcttctttagaaaatgcaggaaaacaaaaagctccataaatcaatgatttatggagctttaatcggcactgtccacgattttgtgtaaatagaaaacttcaggattcgggttttatacttgaatcctgttttcaaatatatgtaaactcgcccgattatggatggattcaggaaaaataatgtaaactattgggttttcagggagatacgcagcattattccgcatttgtaaacgtgtgctttgaagctgttttttgaatagttaagcggaaaaattgctacctatccgttgcccattccagttgtatggagttgtttgaaaatcctttttgctccgaccataaagaacgcagttttatcattttggcttagcgaaggtacttattttttttgagatatgaaaaatataggttccggaagtcaatggtgatagctttgtctatgtttgacgatattttacatgccgatgattaactctgtctccgttaattttgcaaacaatggaacagattatgaatcaaacagatgtaaaggtttcgttctaccttaaaaagagcgagacggatgccaagggaaattgtcccgtaatggcacggcttattgtcggcaagtactctgaaacagcattcagtgttaagcttcgtgtgccacagtctttgtggttatctggacgtgcctgtgggaaaagcgctgcggcccgagacataaataacaggctggatgaaatacgtgcagctgctttcagtatctatgcggaacaatccgcaaaccgtgaagttgttactgcagaagaagtaaaacaccagcttttgggaatggcttcggaacaggaaaccttgttaagctatttcaggcttttcatgagaaatttcgagaaacgtgttgggattaaccggacggaaagcagcttgaacggttatcgaaattcctatgatcatctggttcgtttcttacagtcacaatacaagttgtcagacattccttttgcagcattagaccgttctttcattgaaaaattcgatttgcatttgcgtacggaatgtcatttggctccaggaacgattgtaaatcttactgtaaggctgaaaacaattgtcggagaagcgattgcggacggtatcattacagcgtttccttttgtgggttatgaaccgacgcatccgcaaccggaacaaaaatatcttacaacagaggaattgaacagaatcatgaccacccctttgcatagtcgcaccctttatcatgtacgggatttgtttttgttttcctgctatactggtattccttatagcgatatgtgtatgctgacaaatgagaatctttcccttgctgaagatggcatttggtggattaggagttcacgcaagaaaaccggtgtagattttgaaataccgcttatggaattgccgcttcatatcattgaaaagtaccgggatgtggctcctgagggaaagcttcttcctatgtattccaacagttcgttgaaccattatttgaaacagatagccgtactctgtggcatagaacgcaagctggtcttccacactgcccgtcatacctatgcgaccgaaatcaccctttcccatggtgtaccacttgaaacggtcagcaagatgttgggacacagcagaattggtactacacagctttatgcaaaggttacagacaataagatagatacagatacaaaagcattggataaaaaaattgctgagaggttttctgtagttatttgataatggcaaaaaataggattatgaaaagaaatactgataatatggaaatcaaacgtcgcagtacatttgcgatattgttttatataaaccgtaccaaaatccgtaaagacggaacatgtcagctgctgtgcaagataagcatagatgccaaatgggaacagataggaacgaaagtgtctgtcaatcctgccgtttggaatccggaaaagggacgggctgacggccgcagtgagaatgctattaccgtcaaccgggccattgatgatctgacaaaagaaatcaaggagcattataggcggattaagaacagtctgggatttattacggcagagcaggtaaagaatgctgtgatgggagtcggtcagaaaccgctaactctgctggctcttttcagagagcataacgaggagttcaagaagcgtatcggggtggatcggataaaggaaagttatgattcctacttgcgctcatataagcacctttctgcttttgtgcaggaaaaacgtggtatagaggatgttcttttacggaatcttgatcgtgttttttatgatgactttgaactgtttctcaggacgaacaggaacttaagtccgaagacagtacatgaacacctttatagactgaagaagatgactatgagggctgtcagtcagggaacaatacgccgcgatccttactgtcgtcttcatccggaattacccaaacggaaaagtcgtcatctgaaattggaagatctgaagacactgcttacaaccccggtcgagaagccacagcttcagtttgtccgagacatgttcattttctccacctttaccggacttgcctatgcagatttgaaaagactgactgttaatgatattatacaatctgaggatggttcgtggtggattcatatccaacgtcagaaaacagggacattgtcttctgtacggctgttggatattccgttgaagataattgaaaagtatcgggaacagcgtcatgatgacaaggttttcaatttatacaagcgtgagtatttcattatgcttacccgtaagttaggtgaggtatacggttttgaactcacattccataaggcgcgacacaatttcggaactcatataactctttcaatgggcattccaattgaaacggtcggtaaaatgatgggccatatgcgaattgaaactacgcagctttatgctaaagtcaccgacaagaaagtagatgaagacatgaaacgtctgaaggcagctggtctaagccaaacatccggcttatatgaggaggatattatagtaaggaaacagagacgaaaatcccaaagccagctatcagaaaataaagaaacgaccttgtaacgaggccgtttcttttgcattgtttcatacccatcgctgttcttccctgcatcttttatatgcgtcgtcaagaactttctgtatgtctgactctttgtaaagggcttttccctgcacaaggtagtaaggtatcacaccgagggtccggtattcctgcaaggtacgccggcttactttcaacagctttgaaagttcctcgtccgtgaggaaataatcactgtggaatgcgggtctcggagccgtccttattgcgtctatcatacgctccatgttttccagccctttgaaaatagtatcaatccgctggtcctttctgtctataagatcgtaactcatggctttcttttttgtgggtgataacttgattccaacatgttttgcacatcttccggcttgtagaagaacttgttcttgacccgggtgaaaggcaacagccctttctcacgatatacctgaagcgttctctttgatatgcggagaatcccgcatacctcctgattgtccatccattttttcagtcctgcatctttggccggattgcatataccagtgacttttttctctatcatgctgaatcggacaaccagttcgtcaaatgtccgtttgtctatacatataatttccatactgccgttttgttagaattgaataccgagttcctttttaatttttgccggaagtacctttcctttcctgctcaggaagtcctggacttccgaagccttgtaataggtacgtccgtcaatcatgtagtaggtgacgagtttcttctggcggtagcgtgcaagtgtacgcttggtaacaccaaggagctcgcacatatcctggttgtcaagcagcttgtcaccctcaagagcggccgtctgcctgttcatgcggttcagcctgtcatctatcctgtcaaaccgttccattatctgatggagcatcatctggaatgtctccctgtttatctgtatcataatgaattctgtttttagtgtaataattccattttttacaccgtgttgcgcaacaggtttcattatgatataggccaaaacatagaccaacggaacatatcgccacataaaagcatgacaagtcattgagtaataggaaaataaaaaatcagccccataaaaatgagactgatggaagtattgcaaatgcaatatgttgcaatgccttattgcaatgccttattgcaatgtcttgcaataaaccaggcgacaaattccgtttttgaatgttttggattttacggttttccactctccacgtggcagatgttttgagacggatttatggttcggacgagtggaaggaaacaggaaaatgatcatttcatctatgagatgataaactgagagaccacgcaaaagttctatgctttcttcgtcatgtatctcggcttgataaaggatggatgggtctgacatgtctttctcgcacatgaaatccacaagcggataacccggatagagccggcgggtacatttgtcgcgcccgtatgagaatccgtccttgtcgtctctcatccattgtaataaggggtcgtcttccgccggaatggaaccgtctaatgtcattgctatcagaacctgtaacttggccataccttttttcctctaaatgaaaagcgtgaaactcacgcactatcaggtagaggctctggtaagcccattgtagaatcatgcatgagctcacgctataggacatagcataagctacacgcaaaagcctctacaatatcaatttaccagatttctacctgagacgtcttgcgacttatgttgtaatgttcggcaaggcttaaagcaatgccgatattttctccttatgttgtgactgtcattcctatattacaaagatttccaatcatatgcaaatgtaggcattttattccaaacagaaatatggaatgacggttatttgtcattcaatccatattttttcattttccgatatagtgtggacggatcaatatgcagtatgcctgctgcttgtttgcgactcccatggctggttttcaatgcctgtattatcgagtgtttctcttccgcatcgttttcaggaaaaagattgatttcctcggtcgccgcttcctgtttgatattcaggtcggcggtttcaatgagcggctgtttagccataagtaccgcccttcttatcctgttatgcagttcccgtacgttcccaggccagcggtaagagagaagcaattgttccgcttcagaactgaagccttctgtcggtcttttcagttctccggaaaacttttttctgaaatgatgagccaaagacagaatgtcatcggggcattcatgcaaggaaggcaggacaatctcaaattcgcatagccggtggtataggtcttccctgaaccgtttttcttgtattgcaagttggagatcttcattggtggcggctacaattcttacattagcccgcttttctttgttaccacctattgggatgtatgtgccttcttgcaaaacccgcagcagcatggcttggacgtccagggacaagatccctatttcatccagaaagagtgttccgccttttgccacttcaaaatatccgtccttgttggcgtcggcaccggtaaatgttccctttatgtgcccgaaaaagagggagggtgcaagctccttgggtatgactccacaattcacggcgacaaacggcatatccttccgctctcctatatagtggatacgctgtgcaaccgattcttttccggcaccgttaggaccaagtataagcacagaaatgtcaaatggggcgactgtactgaccagatgttcgacctcctgcatctgaaggctgtttctggggagcaaatccttgtttttgtcgcatatcacagatttgggacggaaaatatctttcagttgtctttgcaattcgtccatctgtaccggttttgccagatagtctttggctcccagttttatggcttgtacagcatccggtactgaggcatatccggtcatgataatgaaagggatatccatccgttccttccgcatccattcgagcaaagatataccgtccccttccggcaggcgtacgtcggacagcacaaggtcgaaactttctttcttgagcagttttcgtgccccaggttcatctattgttatctctgcttcataaccggatttttccaacctttttttctgttgcccggcaagcatgatgttgtcttcaactatcagtattctgtatttcattcatgttttcatttaattatgtccgtccatttacgataatcggctttttgtctcagatatcagccggtctattcttctgacaattctttccacatcattgcggaatgctgactcatccgtatcttccacatactcttcatagctgtacgattccagctcatgggctattcccaattgctcccacatcgggtacatcctgtgcagagtttcccatatccgcttccggtcgagcttttcctgactcaaagaatccagcaagtcagaactgttcctattggattcctctataagagtctccaaagtccagcgttcgtctcctgtagtgacatacagagcctcgaaatctggagaatgattatccattgttctgtcctgtccaatgagtgacgagagaaattcgagcaggtcccttgtatagaacggtttgtggatacagccggcaaatccggcttgaatatagcggtctgcatcgccgtcgttacgggcggtcattgcagctatgggaattgtccgtgaatttcctatgttggaaaggcgtagcagatgcaacaggtcaaaacctcccgtaccacgcatctgtatatcggtcagcaataggtcgtattctccggttctcaatgccttgaccacttcctgtgcattggtacaggctcggcatgagataccgttccgttccatcatttcaactgtgttgcgcaattgtatcggatcgtcatcgactacaagaacccgccgaggaagtctgaggtttcccgtataagtttctggcttgtctcttgcaggctcattggtctgcctaagcggaatttccaccttgaattcgctgcctttaccgatctggctcgaaacagagagtcttcctccgaacaggttcaccagccctttcgtaatggaaagtcccagtccgaagccttctgaatccaaatcaggagcagcccgttcaaagggctgaaaaatgcgttgtgttgtgttctcgcccattcctatccccgtatctttgacctttactgaaagagtatcttcttcataacttgccagaaatttgatataacctgtacgggtgaattttacagcattctccagaatgttgaccactatctgccttatgcggtctgcatcgccaaggacggtgatgccgcaccccataaaagccttgtcaaacatcaatcctttgtcgttcgccttgcgtgtgtattcttcagcgatactttccagaaaggattcaagatggaaaggaatttcgttcagggtttctttagcatcgtccagacgggagaggtcaagcaggctgttggcaagccgggtgatatgacgggatgattcaaggatgtttccgagataggcattgcggcgtttccggtcacgagtatccatggccagttcagcactgccactgatggcattgagaggtcctcgtatgtcatgggaaagtgtgatgattattttcttgcgcatgtcggagagtgtacggttttgtgttgccgtatcttccagttcagccttgtccctttccctgcggttaaggtcacgcatgatgataaggtgcgaaatgatgagcaggatgatggccatgccgattactcctgccattaaaaagaacgacattttctctgcttctgccatttttaactctctttgtgagaaggcagtctgtgcctgttcgtcaaggtcgtttatcagcttgttcaatgtcctgttcaattccctgttgcgcatacgcaggctgtcggcataaatgtccatttcgttcgcctgtctttgatgtattgctatcaggctgtcgctgaaatcatgaagttctttttgggatggcattacttgtatttcttcttttttcccgaagaatcctgcaatcccttttttcttttgttctatggtacggatatgtgttgcacgcctcgccacttccggcaactggtttaccagcacgctgtccgcttcagttcgccgttcaaacatttccattatgtgcagcaggtgtgtctccttttcggcaagcagagcacgaagagtgtctatctgttccgggcgtacatattcacggcagtgtcgtttaagcgagttcaacaaactgtcggcttgaagtcggtggttacgatagtacagatagtccgctttgttccaatttaccacaccctcacccaatgtggcgagccccgtaatacggcgatgagccgtgttgataccacgacgtacaaggtttatgtttgccgtctctgcctcaatttcgcgcatccgctgccgttcatatatcaaaatggcggccatgctaccgatgaccgccataagtatggcatagccgaaaaatattttatatcgcagcgacactgtttgttgatgaaaaatataattggttaactaaatatcaatatcacaggatagtgatccccacccatcatatgatatcttagtacacatgttcttagctgtaatctgctatcgataaggaaataatctaattctcgacctgaaaaatgtgttggcataccacaacaagcaaaattagcactatttcccggcctactcctggtacctgtggtcattattcttaaatattctgataattcgcttggcgttgaattcatatctccgccaatgatgaaaggagatactgcatgacgtactaaatctcttatatctcctacagcaccagacccagattcgcaatgaagggtataaatgttacatccattataatttaaacaaattgcagatcggcctgttcctgatatcagataatgtattgatgctacaaaattcaaatccgcaatgatacaagtattacatctacaattataagcacctgcatgttctaccacaacatagtggtatctaccactatgttgtgcaggcagtatgaaattaccacattcttgtatcataacgacattacattgttctgttgttaatagatgattcaatatatttaatttaatagcatcattaagaggatttccttgggaattccatgtacaaattttcatatggctgtttttagatgtttgatgcatttattatgttttcataataattattatcaaatttgaacgggactttatccatcccgttctatatgtttatactctatttactgctttctgtatttataggctcgatacaggaagccattatatccatcagttttgacagaccttcggtctgtggttgctggctggccgaaacatgtatctggtattttgccgtttggttggtcatgcgggtgttctcgcgggcggtcgtgactttgccgctgatttccgcatttataaaccaatgttttgcagaagcttttgcctctacttctgcgttggtagtgctttttacgtttgatgtatcggtaacctccatctggaaatcgacatccacgcgatctatgagcagggaaggaataggcaccaatcctataaacggagccttgacactttgtgacattgttgtcatttttccatcctgctgtatcggtctttcgacatcgaattccaatatacgcgctttattgccgcttttaccatcaaatgcaatttgctggtagaaattccatgctgtcgctgccaattcctgttgtgcttcggctgctgcaataagtggagctgcaataagttcccgcatgggaagccccttgaatttgtcagtcacgtttgaatctgctttaagaactggagaagtttctctgttttgagtctcttccaatgcagcggagataatttctttcgcctgtccgcttacattttcattcaagttttccgcattttcttgttgcccttggttctttatttcttctgccataacatttgaattttaaaattgttagatattttttacaaaatcgtcaataattcgggaaatgctctccggagtctcctgaaccttaaaattgacgcaaacctccatgacatcatccgcatccggttttatgttgctcatctgcatctggagattggctctttgtgggctggataacaataagttgttttctggaatctgtgattccacgcttccgaccttcgccttgaactttatctgcacattatccatcgcaagataatgatgggatatcaaagctataagtggaatatcaatagtcttgtctccaaccatgatttttttcgattggaacgtatttgcgttatttgcatttgttccttcaaaaagtctggtcagattttgtatctgatgattctgcaatgtatcttgtgcacagtttacggcgtattgcaaaccattcataatatcagagaatgaattggtttgaacactgtccggctcatcgtcattatttttcttgtctctgtgaaaaagtcccatgtttttaatttaattacttgatttgttgcctttaatgagcaccaatcttgacaatgtccggcttacagcttccatatttacactggagtctatattattattaacaatgccttgatgccaaaacctatatggtggattctccgtgtgttccagcacgtcctcctttttttattggggttatacttcggttaatgttcgttgcgggcggaacatttccgcccgcaacggcttactgcttcctcaaggatggcaatgctcctttaagttcgtaacgccactttgagcctgcgttctgcaaggcggtgttcatggcatcaacggctttctgccaggtaacgacagagccgtccaccttcgtggctccggtgctttccctattgtagccgatgccttgttcatgattgttcttccaatagccggcggtcacggtggtgtagttatttcccaaaaagccgccgatatgtactttgccagtgctactacccgtactggttacgttgcccgtggcatagcaggcaaggaggctgcttcctgcgttcattcccaccagactgccgccagcgatattctttgcggggtttatttctatggtcacgttgcccgtggcatagcaagcggtcagggtggcactcgaattcgtctgacctgccacgccgccgacatcgaccgttcccttcactgtggcagaggaactgcatccggtgatggaaccgcctatttgagcacccaccacaccgccgacatacaccgtgccgctgacgctgcccgacaccgagcagttttcaatggtgccccagctatatcctaccacgccgccaatactgccgccatatatttgattgcttgttatctgtacgccctccatcaccacgttcttcaccgtaccagctctattgagccagccgaacagacccgcatattcgtcatttgtcgtaaaggtcagccccgtaatggtatggccgccaccgtcgaaggtgcctttgtatgagttgtcgtagtctgtgcctatcggtgtccagtctttgcctgtgaggtcaatgtcagtgtcgagggtaatgttaatgtcgctcttacctccgttcactaattcggctatattcatcaggccatcagcggaggtcaccgtgtagctgccgttgctctctatggtatagcccaggtcttttgccgcagcgagggagacggtgtaggtatattcaccgcccgcctgccagtcggtagcattcttcatcttataaactaaggtcttgccgttagtgaaggtgcaggtgatgaaggtcgtgccagctgccacactttgcggggctacgatggcggtgtaggtgttgctacccttgtcatacgggacgattatatccgggttgtcgccttcggtggagaggcccgtcagctgcacggatgccagcccctcggtgtagtccgtcagaacgacggtcactcgcgccgtgcggtgggtgaagcggagcgtggggctaccgtaggtcaccgtctgcccgttggctacgatgaggtcgctgccctcaaagtctttctgggcactttggttggcttttacctttaccgcaggtggggttgtctcgccagcggtgtagggccaccacgctgtgacggtgatgtctttgtggttggtccagtagtacgggtcggtggaggtcagcgtggcgcttgtgggggcggcggtggtgggcgtcacgttgtacgtcttcaccatgccgtccatcagaactgccacgctctgcacaccctcccaattgccatccacgggggcacgggtgccggcggtggctgtcgcggcgggattcagccccgtggcggtgaagacgatgggggtgccttccgccccttctggtaggaagcccgcttcgtcctgcgtgcaggcggcaaggccgagcaacaaggcgatggctgcggatgtatggatggttgttagtttcatgatgcgtgttgtttaggggttgttattgtttcttttcagtacgggcaggccgtcggtgccgagtgcccactggtagtcgttaccggtgagggcggggttcatgccgtcgacggctgtcttccatttcacggtcgcgccgtccaccttcgtggcaactaccgttcctccttcattacgtaatactccttgcccggcattgcctccccaatagcaggaagttatattcttgtagttgaaacgcactatagttccacagccagactcatctttcaatgtgccgttgaaccagcaagcgatgatatcgccataatttgcattggctataccaccactatgtacagtaagttttcccgtcacagagcaggcaatgatttggccatgatttcggtccaccattccagcagctcctccactactgccatccagattcacatctatgagttgtaggttctttatcactccacttacatttaaaaaataaaaaagtccaaaactcgctgctgaaaagtttaatcccgtaatgcggtgtccttgcccattaaagacgccggagtagcctggccatgtgtctaaacgtgtccattccctacccgtcaggtcgatgtcggcggtgagggtgcaatttatcgattcatctttttgtatggctttgttccatgccaataggccgtcggcgttatagaccgtgtaggtattggtgttgctgtcgtagatgtagcccaaatcctcagcctcgccgctctcgccgccgccgtcaacccagtcaccgatggtgcaaccctctaacgtcaggccggtggtgttcaccttaacggtatatttatagcggctgcccgcttctaatacgacgttgttctgcggacggaagtagaaggtgccgccgccgagttccaccttgacgaacggcttgcctgccgcaacggtctgcggggcggtcagtgcctcgtaggtgttgccgcttgcgttgtaggtcttgatggcagtcgggttgccgttatcggcggacagactcacgaggctcaccgtggcaccggcgacgctcgtgaatcccgtgccgggcttcagttcgatagtcacgcgtgccgtgcggtgggtaaattcaagagtcgggttgttaaattccaccttccggttctcagcagagatgaagtcgctgttctggaagtcagccaatttgctttggtcttcggccaccttcacggcaggcatctgtgtgatgttggcattgttgaagggccaccatgccgatacggtaatcgggtcgcggctggtccagtagtacgggtcgttctcgcgtgaaagcgtggcactcttgaaatcggtagaagccgttacggtgtattcctttaccgcatcgcccatcttgagtgccacggaagtgacgccctgccagtcgccgtccacagcggcacgggtggaaggggctgccagcggcgttgcttctacggacaatccggtggcacggatgacgacggggtattcaccttcgggcagacggttatcgccagcaagttcgtcctgcgtgcaggcggcgagggcgaacagcagcgcggtggctgcgaatatatggatggttgttcgtttcatgatgcgtgttgtttaggggttgttattgtttcttttcagtacgggcaggccgtcggtgccgagtgtccaccggtagtcgttgccggtgagggcggggttcatgccgtcgacggctgtctgccatttcacggtcgcaccgtccaccttcgtggcatctaccgttcctccatgattacggaatactccttgcccggcattgcctccccaataacaggaagttataatactgtagttataacgcactatagctccagattcatactctttcaatgtgccgtcgaaccagcaagcggtgatactgccataatttaaatcggctataccacaagttctaccatatgcagaaatttttcccgtcacagagcaggcaatgatttgaccctcattttgctccactattccagctgctgatccactactgccatacagattcacatctatgagttgtaggttctttatcacaccacgtacatttaataacccaaaaagttcagtagtcgctgctgaaaagtttaatcccgtaatgcggtgtccctgcccattaaagacgccggagtagccaggccatgtgcctatccgtgtccaatccttacccgttaggtcgatgtcggcggtgagggtgcaatttatcgattcgtctttttgtgcggcttcgttccatgccagcaggccgtcagcgttatagaccgtgtaactgccgtcgttctgtatagaatagcccaaatcctcagcctcaccgctctcgccgccgccgtcagcccagtcaccgatagtgcaaccctctaacgtcaggccggtggcgttcaccttaacggtatatttatagcggttgcccgctgccagcacaacgttgttctgcgggcggaagtagaaggtgccgctgccgagttccacccggatgaacgacttgcctgccgcaacggtctgcggggcggtcagtgcctcgtaggtgttgccgcttgcgttgtaggtcttgatggcggtcgggttgccgttatcgtcggacaggctcacgaggctcaccgtggcaccggcaacgctcgtgaatcccgtgccgggcttcagttcgattgtcacgcgtgccgtgcggtgggtaaatccaagtgtcgggtcgtcaaatttcaccgtctggttttcggcggagatgaagtcgctgttctggaagtcagccaatttgctctggtcttcggccaccttcacggcaggcatctgggtgatgtcggcattgtcgaagggccaccatgccgatacggtaatcgggttgcggctggtccagtagtacgggtcgttctcgcgtgagagcgtggctttcgtattgtcagcggagttaggcgttacggtgtattcctttaccgcatcgcccatcttgagtgccacggaagtgacgccctgccagtcgccgtccacggtggcacgggttgatggggctgcctgcggcgttgcctctacggacagtccggtggcacggatgaatacggggtattcaccttcgggcagacggttatcgtctgccagttcgtcctgtgtgcaggcggcgaggccgagcagtagcgcggtggctgcggggatgaataatctatgtctcataattctttattcttaattattaatatcttacaggcccgcgcccacttctccgccgtctatatcgttccactttgcaatggtggcttcgctgacttcaaggactttgttgcgtaccttgacggtataggtatagttgttgcccgccagcagtgcgccttcgggcatggtgagtgtggcatgatattcctgacctttgtaattcacaaccaacggcagggatgcaactgtctgcgggaagaggatgatcgatgacgtgagaacgccgtctgccaaattcatggccagttctccggtctgtgccccgttgtctgcggtggcaataccgtcggccgtgttgaacgtaccggtgagtaacaatccgtccagcgtgtaacgttcaggcttgaccacgctgaaatccacgccgtcgcccgcctcgaaggtaagggttatctggctcatgcggtggtggaaggagttgtcttcaccgcctttggcggttttgtcggtgaagctcactactgggttgtttttgtctcctgtggctcctgaagcaaagaggaagtcgatggcaggctggttctgctgcgccgtgacatcggtcgtggctgcgaggatgcctcccgctgcgttgtacggatagtaggcgcggaaagtatgggtctttgtatcttcgatatagatgacctttccttctgcctcaaatttcccgtttttcaggatgaaaggcacgttgccgtactgggaatcgttgccgatgtcggtgatgccgatacggtcgccgccagtccaggtggttccgctggcgcgggtggtgggggcgatgttggcggtaaactgggcggccacggggtcaccgttcaggttctcgttgtcgttgttgcaggctaccagtgcgagggcgagcgctgcaagtgtaaaaaatcttgtcttcattatatctataattttattatttacaaatcagcatttacatcatcacctttcacttcttcccagccgttgatttcggctccgtccacttccatgccttcaggagtctcaaccagcgttccgccgagggtcagcgatttgccctttccggtgttgaactccttgagggcttccgtgaggttgcttttcagcgtggtggggctcgggttgccgtccgcatagcggatttcagccgtcagcagttgttccgtgccggtcacacccagcagccgcaccgtggctttccacttgccggcatcgtcaccttcggtaatcttggtgaagggcagcacgacgttcgaagcggctccgtaggtatcggtagcgaagtcgagtgttccggctgcacccgtcagatgggcaacaatctccgtgatgcgtccggcggcatcaccagtaggttcgacgacaagcgtcagttcgcgtacctgctgcttcattgcggcggtcagcggatagtccttgtctttctcgatggtcacctgttccgtataggtgaagaaccatcccggggcattgttcacaaaggcatccgtgcctgcccgggttcccgtggctgcggcaatggtggctgtggtgccgttcaccgtgattccttcagccgggttccacaccgcaagggtgtagctgcccggagcaaacagatggtcgggggtatgggtggcggaagtctccgtacccgtatagtcacccatggtgaccgtccatgtggcaggtatgtcgataccttcaccgcgggccgaccagtcggctgtcaccgcaatcttcccgtagtcgggatgcggcgtgtcataaagcgtgtccttcacgcaggaagagagcagcacggcggctgccattcccatcatatttatatattgtcttgctttcatattctattcctccgtattagaataacttccataccaatgtcacaccggcattgatgggaccacaccaatcttttgtctcgttgccgcggcgtacacgtacaccgtcgatgacttcatatttttcgaaatcggcattcaggtagcccaaaccgaggttgaaatcaagagccagtgccttgttcagccgcagctgatagccggcggtgatgccgccacccatcaggtcgccctgcttgcctgtttcggagagcttgtagttgaactgtccggccttgaacatcgcgcccagataccaggctttcttctcacccatatagtaacgcacttccggagccacttcccagagtgcatagcggtggtccttgtcgctccacgtccatgaagtccacgagccgtttacggcaatgccccacgatgggcagatgcgccattccacgccaagatctggtgtcagggtagcccagcgcagcaggttggcacgcagggagagatgataatcagttgtgattttggtttccgacggcgtgtcggcaagtgtattttgttgagcggctttctcggcttctgccttttcagcggcaagtcgggcttcttccgccttgcgctgctcttcggcaagccgttcctgttcggcacgcttctcggcttccagtcgttcggtttccgccttgcgtcgtgcttccgcatccgtcgcggcagttccctttaccggtaccgtcaggcgcacggtgacaaaatcaccctcagtcgcatggttgcgggtaatgaaattctcctcttttatttccgcacggataatcagttcggatttcacacggttggcacggatcttcgccgtggcaaggttctcggcttcactgcccagtgaattacagtagccgtcaaccaatagcggcagcttgccgtcaagaattgtggttttgttgttttcgatacattccaacagacgggcaagttccgtgtcattgccattccaaggcacgtagaacgtgtccttctgcggaacgaaccggaaggtgtaggtcgtgtctgctttctgctgcgcaatgacaggaaaagttaccgtcatcagccacagaaacagggtaagaaaagtgatttttctgctcatataaacttgaatttattatctttgtcttctccaaaggtaataaatgccattcagcgcccaaaatattacaaaaactttttctgttgaaatacagcgttttataaaaaaaatgtcgtttgagcacttttcaaattgtcgttagagcacctttttgtcgaattagcacttttttgtcgtttgagcactttttgaaaatgggtttctgagacctttttcaatgttttttagtacacaaattattcccgatttgcttttttccatttggcaggcgtacatccttccttctcggaaaataatttgataaagttactgcgggaaagaaaaccggaggactcagccagcttctgtatattgatttccggatgctccttcagcatgtttttcgcatactccaaccggagactggttatccattcgcggaatgtcattttatacgtagtcttgatataagcggaaagattggtacggttggtatgaagcacatctgaaagctcctttatggtaaggccgggccggatataaccgtccgcatcgatccaacctttgatttttttcgccatttcggcatggaaaaaaggagtatcctgcctctgtgcctgttcccggtttgtggtgtcacacaggtcttcctcttcagaagtcatgccatcctccatcgcgttttccacctgttcgtaaaacagcagatagttcagatagcaaaggaagagataaatgtagaacggtaccgatgacagaatccagatatagatgtattcatcaggcaggaatgtcagcagtccgcatcccaccccgaatgtgacagcccagtaggtgaaaatggaaagccatttgatataggcaccgatgtcatccgcacgggtgtcatcgaaaatgcggatgaccctgtgataggcccggagaagcctacgggtcaagaacagcccatagataaccaaccatgcggccaaggcaaacatcaccgttgtctgtaaaccaccttttggtaacaacagcagaacgataccggaaaggatggaaaacagtatccatagacagatatgcgtccgtaaccgacatttggtgatataaaagcggtcaagcagagtggtgagggccgaactgaacaaccagtagcacaaaaaataggtggacaggttcatcaggatggcggcatcggtattcttgaacctgattccaaaaaagaaatgtaccgaatagttggcggcaagtaacagtatggctacccccataattcgccgggaacgcagataattattgaaaatggctttttccggggttggagccaacaaaaaataaaagccgaagaacgacatcaacggcagcgcaatgcaaagtgaataactgtatatagatggttccattgtgtaatatgcttatttattttgcagggcaaagttacaaaactatcagcgaaccgaagtattctcacagcttctttttatgtctaaataacactgaaatacttttatattagattgatatcgggtttactttcatcgttgccaggttcaaatacaccccatgatgctctatcatcccgttgcggaacatcttccacaggatattgcacccgagttgcgccagcgtggagttaatgaacaagtcctgcttctccaatgcttctgccagcgagcagctcggaccggaatcctcctccttcactctcgcgtatttcacgaaacgggtgatgaccttcagcgagccgaccgcttcatacagcgtggaagccggttgcctgatttttttcagcacggtccccattataacctgtccggtcgtttgcgtgttgccgaagtccatccagtagagtggcgtggcattgtccgtgtaggaggccggcggcatctttcccagcacgttccacaggtcgagccgggacttgatgttgtccgtgcaggtgacggtgatgttcgcgatttcatcccgtttcacctccttcaacaccgacggatagggtctgggctccgctttccagtcgttgccgaagaaattattgacacgggtaatgaggcatttcgccttgttcaggcctatgtcggaatcactgaagagttggcgtccgatgttggtcccggacacgatgtcagggtcatagagcgtgacggacaggccggggtgtccgagcgcccgcaatgtcacgtcgagccgggccagacatgtcagcacctgcgaaccggttccgcccgcgccgataagattcactgttaccgggtgctgcgggtcaatcaggtagttgtcgatataatgcactcttttcatttcagtatgtcctttagtttcaagttgttcaacggtctcagttcttcaaggtcgaaaggtctgtcctttgccgctttcgtgaccagaacgagatttgatttggtcgggttgccatgcgctcccagatgggagaactccgtcagccagaacttcctctcccaatattcgagcagtttcgcgtaggtcaggtctttcggcttctctattctggcggaacccagacagacgcttgcctgcgtcacgttgaagaacggggcggcataaagttccgtcttttccgtcggttccctgtctttgcaggcatagacattcaggtggctttctccggcctcgtagatgattcccggcagatgatactccgcgttctctatcttgagggcttccttgaagaacatcatacgtttccggggagagttgtaccagatgtatttctcgcttcccttacgcgggtcgcaccacaacaggttggacggtatccttccatacggtgtggcgctgtgcctttcggaatagccccgtaccagctcgttcatgaactccgccgtcaccggacggccttcgcccattataccgctttcatctatatccctgacctcgatgaaataactgttgtcatatacataatgactgttgtcttcccgggcataggcaatcagcgctgcccgcggatggagcagcgtcctgagttttcttgtcaattcgttcgtttccagcatgttttaacagattatattgatgaacttatccgcccatttgaagaaccgctccggatagtcatccatccggaacagttctccggtatcggacgagaggtcgcaggtcgttaccggcgtgatgtcataggtctccctgctgtttgaattgtaatagtcaacgagatattcagacactatatcgttgatgtcatagacgacccttatctgctgttgcaggtacatcggatggaaatccggattctcggagtagtaggcgtcatacccgtaccccatgatgccccgttccggtgtcaggaagggcagaccgctcctcatggcgtcgaccagctgcctttcaaacccgttttggggagtgtacgagccgattgcccccggcaggtccttgtaataggactttgcagccacccgcctgagcagcctgcctattttcccctcctgataggaacgcacaagtttcacccggcttttccattcctgcgggtcatcgcctccgtcctccgagagcagctcgaatatgaactccgcgtcatcgtcatccagaatggtgctgataccgttggccgtcatcagcttgtggataaaggtaatggcgatcctccttaaaacgggactgagtgattccaggaacctcacagggaaatagtacagcgtcagacttccccaccggtggtacttccacaaacggaagaagagcctgcctctttcctgctcgatattgacattcagctcatcccccacaagcgcgtccatctcgtcgtacagcctggctatgccctccccgatactgtttcccggtgtgtgcgccgcttccttttgcagcaacagggcatacttgaaaaaggaatcacgcaggaactcatagttttcccgcgtgattacattgatgctgccgcattgaagtccgtcgtatgtctccacgacaaggcttttcagggcaaccggtgcaagcgccgtgctcagaaaagaattacggccccgcttggagccgcaatccgttctttcctgtccaccccgtatcgggtttccctccgtgtctgcccgatgatgagccttgccagctgttcctgccggtgttcgtccaatggtacacatggtttcttgtttttctttttcctgttcttcctcatatatcctatcctttggttccgacagtggtcttgaactcgtacacggccttgtcatccttgagtaccggaccgtgtaccgtcgcggttgtcagttcaggataaaagttggagtaataattcatgaccatttccgggctgtccgacgggttcggatcgtcgagcgtgaccattccgctgcctttcttgaacgtgaatgaacgtgtcattcctgtgatttcgagtgccatagtcttaaactgtttgatagggtgaatacttgggttctaacatggattggggaaaatcgggatattcctcgtaatccttgggattgtaattgatttcttcgtctgcggggtattgcatccggtagtcttcaggcgtgaattccggttcctgccagtgcgtgacttcctgaccgccatagttttgcggttgtacggaaggctgctgtgcgtattgcggttgtggtggggtctggtgttgaaccggtctgtgcggcggttgctgaggtggccacatcgaaggctgttgcggttgtccggccatggatcccggtacctgaggctgtggcggatagggcggttgctgtacggaaactgccataggttgtggctgcggttgctgtcgctgttgtgccgttgccgccataggttgcggtcgtggctgcgactgggcttgcggcaccggttcatccatcagttcgaacaggctgcccttgttcatcgcctttttctgctgctccatcatttcgtcaatcttcttctggtcctgtggcttggcatggaggcgtgcctgagagagtgcggtgacggcatccttatggttcttggccgcgatcagctcctccgctttcttgaggtgtttctcgtatttctcccgcctctccttctcctctttcgtctccttggcctttgcatccttcgccgccttactttcggatgcggccttctccgcctgcacctcgaattgagccatgttggtgattagtcccaccgctttctgtatcgggcgtgcgacggtttgcaggaatcccgcgtccagttcctcgggcttcccgttgaccgtcaagggtacgatgtggttctgagcctcgtccttcagcccgttcgacttcggcagcgtggatactgccagttgtccgtttgctttacggatgaccagcgtaaggtccacgccttcggtcatcatctggttgattgctgtaaaaaacataattgtatgaattaaagtgtgaataaccgtattctttctatctgttgaagaactccgccagcagcctgttccggtcgggatggctgcatatctccagtaccgggtccagcagcgtggagatgtgtacgggtccgcttctttcccgtggggggaatttgacggtcggttccgggacaggatacttccttcttgccggtatcggcactggtatctgtaccggtgccatcggcggtcttgagatgattgcttgattcatgactctataattttaattgtgaatacctgggctttggcagcccgttgaactacaagggctttacggcaaacgcttccggaaaggcaaggctttcgggaaaaataccgcaagccctccgggcgaggatgatttttccccgaaacccggagggcccggccttgccgtccgaaaagaggcgtttgccaactttgcccggtagttctccggtctgtcaatggctgtatatgcctccctttcctttccgaacgtgttttcattatccctgtttccataaggcatggaacacaaaaagagccgtcctccgtgaggacagccctgtcctgcaaggtattgcagcggtttatatgccgtatttgttccatcttcctatattttatgccggtggaatcagaataccaggtagctgaggatacaaaaaagtatcgccgctgccaccaggaagcaggctaccttatagagaaacctgaagaatcccctgaaacagacgatggcgactgccgtccacacgggcgacacgcctcttgaatacagataaccgaacacgatgaaggccgcgatggccaatactgtcatccttgtccatttgcctgttgtcagttttccgatatattccctcgttttcatgaccgtatattgttaatgagtgaaacatgtcatttccaatttcgggggccggagagcggaccgcctccacaggcaaggttttcggggaaaataccggagcggggcgaggatgattttccccgaaacctgcaaggcccgaccttgcaggtggaaacgggcggttccgctacctttgcccgcagaattggaatggcgggatcatttgccttttgcacctttgggcttgggaaaagaaagtttcaggttaaaactgtcgtcaaaggtgagtaccgcatcgaaagaacatcctttcttacccttgaaacccttgataagccgggtggagccggatgagaaaagctgttcaagatgccggtcggtcagttccttgttcaggaaacggcggaacaccagcagcccgcatccttcacggtcgcatttcgcgaccttggacttcaccaccacgttgccggccttgcacttggggcaggtaaaggcgtgtgatgacggttccgggaatttgaggcgcaatatctcgccggttacttttccggtgtattccctgatggagagcatgaagctgtccggatcgagggtacgtccctctatccgtgccagtgccctttcccatgtgccggtcagctctgcgtcggccaccatcatgtccttcaccgattcgtagaggtacagccccttttccgtcggcaggatactcttgccggaacgctcgacatagttacgtttgaacagggtcgtgatgatggcggcacgggtggcgggtgtgccgatacccgaatccttgacagtctcacgtgcctctccgtccgtgatatcctttccgcagttctccatggcggcaagcagcgtggcttccgtgtaaagcggcctgggcagggtcttcttctgcgacagtccgcgacccgagagcggaaccagcccgccttcggcaaacaaggccgttcctccgccatcttccggctcgtccttttcccggtcctccttccgggcgaataccgcccgccagcccgtgttgacgatgaaggcggagcgggagcggaaatccatgcccccgcacatacactccatgagcagccgctccttctcgcagggcggggagaaggcttccagcatcctgccggctatcagggtgtagacggcggattccgcctcggacaactcttcgggagcgacacccgtgatgatcagggcatggtggtcggtcactttcgtggtatccacgctccgggtgttcagagcggaaaaatcgaaagtgcgtccgtactccctgaacagaggcatggcaatgattttttccagcaaggcgggtatattcgccatgatatcttcgggtatgtaccggctgcccgttctcgggtacgagaccagtttcttctcgtacagggactgggcgatggaaagagtcttgtccgccgtaaggtcgtggtggatgttgcagtccttctgaagggaggtcaggtcatacagaagtggggcctgctggaaaaccgtgccacgctccactttggtgattgtcaccgccgagccgggaatgatgcgtccgtatgccgtttccgccgctttcttgtccccgaagtgctccggatggatgaacagccggtgcgcctctccctgcttcagcgtgatatgaagctgccagtatggtgtggagacgaagttgcggttctccttgaagcgcgcgcatatcatggcgagggtcggggtctgtacccgtccgatggagttgttcgccgaaccggagactgccgccaacgcgcggctggcgttcatgcccaccagccagtccgccttcgccctgctgtccgcggccgcatagaggctgtcgtattcatatccttccctgaggtctgccatcccctttcggatggcctcatcggtaagcgaggagaaccacaggcgtttgaaaggcttggtacagcccaggtgggaatatatccaccggaagatgagttccccctcacgcccggcatcggtcgccacgatgatgctgtcacattcggagaacaccccgtcgatgaccttgagctgcctgccggcggcgatgtccgtcaccatgcccctgtccgtacgtatctgtcgttccacaagacggaacggttcgggaagcatcggaaggtcttcggcggtggttctcgtgtagccgtatgttcccggcaatgccagtgatactaaatgtcccagcgcccatgtcaccatgtagccgtttcctgttatgtagccgtcctttttctctgtagccccgaccacacgggctatctcctgaccgacactcggtttttctgctatgattgctatcatgattcggataagaattaagccgtttcccgcttgccggcgtacggagggacgggaaacggcggttatacattcggtttacataattataaaggtggagttactctcccacggacttgatgccgaggatttcgagcagcgggtcaccgtccttgcgtaccagctggagtgtggcgtccatcaccacgtccacaccgaggagcacgaggctgagcggcatcacttttgttttctctcccctgagcagcgtgtcaagttctcccgacatctccagctcgtccttcaggatgccgatgcctgccaactcgtcccagttcacgtcctccgccttgaaaggcgtgttgttttccttgttcatttccatgttctgattctttaggatttcacattcgttttacttttactttgaccgtcaggctatgctcgcgcccctggattggcggttttcctctccctgtctttgtgcggcggacaccacgttgcgctgcgcggcgtcgcgtctgcggtcggggttctcgttgtagaagtccagccgtccctggttgaagttcgccttgacgtactgcgagatggtcttgccgtcataccccttgatgccctcgaccagtaccgccttgccgctttggaggtcggcacgctgcttgcgggtaagctccacgtcccataccttggccggtatcttgaactcctcgcgctggtcgaaaccgtccggtgtgcgcgaatagctcagacggcccgtttcgaggtccgccttgatgaatgaggagaattcctcgcccctgcggttcaccatgccgttgaggaagatgggccgcccttcacgcagctctttctgctcctcgggagtgaccttcacgccgcctatttcattcgggatgtagatttcccgtgcgccttcaggggagtcgggattgtagcgggtgtaggacgggcggcctgtcgcttcgtcgagcttcacgtaggaggagaacagttccccgtccttgcgtttcatgccctccacgaaaatggccttacccccgttcaaatcatcgatctgtttcttggtcagttccacgcctcccagatactgccggttgaagagcttgtcgttctcgaagatgaactccacgcccctgcgctcggcattgacctggatgtgggcatcgaacggattgcccgatctggccgtcattccttcgatgaatattttctttccttcacgcaggtcgttctgttcctgttcggtcagtttcaccccgctgatttcacgtggtatgaagacattctcggctttcatcgccaccacctcgttggtcagcttgtcgatgctgacgaaagaggggacatactcgccgttgcggtttttcagttccacgacacgccccatgttgcccgtctcaagcaggttcttcttgtcctcgtcagagaagatgtgtccgaagtagggacggtcgaggtcgggtttctgccggataccgtggatgcccagtacgatgtccccagcccgggactgctggaacgagagcctcgcgtcggtacgtaatacggcggagccgaagttcatgctgatgggcactacctggttggtcttgtagcctctgagcatctggtcgagcagcccccgttcctgaagttcctcacgggagagcccgaagttcttcagctgttcccagttgatcatggactcgttgtagcggtactggggctgttgctgcgtgcctccgccttgggcggcctgctgctgtgtttcattttcttttgtcatttcttcttgattttgatggttgatactttggttttccttgtcgcgggggacaatctcgtactgtttgaggaattcttccaccgcgtctgtcttttttccggcggcgaggtcttcgatggcctgcctcactttcgggtcgtccagtgctttctccttgacggagaggatgccgaagcgtgtcgggtccttgagctggctccagaaattcttcaggaaattctcgaacatgctggcatagcggtcgattttcagaaaggagtttgtatgctccttgtctgccggaaccgtcttgtacctgccgtccttgtcaatttgggacactgcctgtaaaatcagttccatcttgtcgaggataaggatgatgtcgctcatctgttcgttctcggcgacttgcggtttagggggatcgtcccttccatttttctttgccataactttgtttttttagggttgataactatgattgtcagtgcaaatatataggatgatttctgatatataattgatttacaatacgttgtgctatatgtttcaccgtttgtcatcctgtttcactgcgggaggaaaagcgggaggcggaaaaacgggaaagtcagaggaaaaagcaaggaaaagcaccggattaaaaaggcggaaaagggcgggcacacacgaatggtaagccccaggacaagaaaaaacggcaggaacgccacgaaaccgacaaggagaaaaccgtattatgcagagttgcgagcgagctgtctttagtccccgcttccttgtgccgctctataagacaggaagaagattttgtatgggagatgtgttgacggcgtaatccattgggacatcaagcacggcaaaataccgccgtcagattgttttttatcttgtcctatgcgtcgtaggtcgcttcgcttgctaagtcccgaccgtctccacaactcggacggcgataccggaacgttttttcgggtgaaaaattaccgcagggaattttttgcccgaaaaccggaggcccgaacgtggaaggtatcgtcctccgggttatcttcttgaagggacttgtcaagcgaagcgtgcttatgatggatttttatagaggaatatggaataagacaccttgatgataaaagtgcgctaaaaaagtgcagaagtaatcagattttgattacctttgcactaaaaacgctcgctatgacaataagagaatggattagagatagggaaattggtggctttccaactttttcggttgatgatgtaaggcaaacatttcctgattattcggagcaagtcatcaagaatgaattattccgattatcaaaacaaggcatcttatgtcctgtgtataaaggcttttatgtcataattcctcctcagtatgcagcaaaaaggatggttcctccaatatattacattgatcaattgatgtcgtatctgaataaaccatattatatctgtttattgaatgccgcagaaattttgggtgcagctcatcaacggccacagaagttttctgtaatgacggtattcccaaagtcttccgtctcttcatcaaagaataattcgcttgtttggggatatcgcaaggagattccatctgattttttattgttcaagaattctgagacaggagtgatatactattcaaatgctgaattgacagccattgatattgtacactatgaacaatatatcggtggcctctcaagggcagcgaccattttggatgaattagcagaaaaacttgattttcgtaaagcttccgataacttatttaactatacatcaatcgctactatccaacgattgggatatatattggatgatattttagaacagaaagagattgcagaagtgttacattctgaattattgacatatgtcaagcgttttagatatattccccttagtacacacaaaactgatgagaatgcagaaaagaatactcgttggaaagtttatataaattcgataatagaaacagacgaaatatgataaacagaacagccattacccaatggaataagattgttccttggaatgataatgcacaagtagaacaagaccttattatctctcgtgcattagtcgctattttcagtgataaattccttgcttcacagcttgcgttcagaggaggaaccgcacttcataaattatatctgtcgccacagcctagatatagtgaagatattgatttagtacaaatcacaccgggaccgataaaaccaatcatgttcaagctaggtgaagtcttaagttttttgcctgatagggttacaaaacaaaagcgatataacaacacgatgttatttcgtatggagtcggaaatccccccgacaatccccttacgtttgaaaatagagataaattgttttgaacatttcaacgaattgggattggttaaagttccatttgaggtggagaatagctggttctcaggaaaatgtgagataaccacatatcgtttgaacgaattgctgggaacaaaattaagagcattgtatcaaagaaaaaaaggccgcgacctttttgatttgtatgttgcactgtcggaagcggttgtggatattaatgaaattttacgttgctacaaccgttatatgtcgtttgttgtgcaacaaccacctacttacaaacagttcattaacaatatggaagaaaaaatgttagatcctgattttttaggtgacactcagaatcttatccgtccggatagagaatttaatccacgattgggttatgaacttgttttggaaaaattgatagaacgaatgcggaaataaatataatattatcagataggacaaaataataggttatatgaacgtggatcatttagattgccttttccaagagtacggatatgatgtaaaagaaagaaccgcatcatatagggtgtatttgctgaatcaaggtatgtaccatggagcagaaatccaaataatggacgatgatattgatgctactccgatacttgatcgttactccaaattgggatatcatgcaaaacaacaaaggttcaaatcgattgaacaagcagaaagttatttatttaaggggttctttaatacacaaactactgcaaatgatataaatagaagatatacagaatttgctgctaatcaagtaaaacattattgtaattgtggtattaagtaccagtatatcagtatgccatattctatatatagtgaaggtgcggaagatactgttagtggaacttcagatatcatttctgcaattaaagaagcaatcaatagaaagggggcacatcttgtagtggtagaagcagctgctggatttggtaagacctgtacagcatacgaagtatataaatcatttttagataatagtgaatatcaaaagcccatttttacagaattgtcaagaaatagggatgcaaagcagtttaaatatattctttggtctgaaattgacaaagagaaggatacgactgctaaacaggaattagttgtttacaatataaaaaaagggaaaatccctcttattattgatgggtttgacgaattactgtccaaaaacatagacaatggaaaggctggacaattgaatgaatttgagcaagttgaaacaatgctttctaccataggagatttgttgacagatgaagctaagattattcttacctctagaaaaactgcaatatttgcaggcgctgaatttggagattgggttgattcttacaatggaaactttgatgttatcagatttcaattagagaaacccaatattaagcaatggctttcaacagaacgttatgaggaaatcattggaaagaatgttcctttggataatatttcaaatcctgttctactaacttatttacgaaatataagcaaggaggattttagtgatttattggtttatccagaaacgattacggataagtattttgaatatctactgaatcgggaaaaagaaaggcaaaatcttattattcgttgggaagaccaaatgcagatatttgaaaatttagccaaatcttttgttgattttgatataactggtgaaaatagaagtttcgtcaaagaactgattatagaatataacaagtcacgtcttttgtattataaagagttgacaccgacaaaacaaactttggatgaacttgctgacacacttacaaatcatgccctattagatagaacagggaataaagattttataacttttatcaatgaatttatttttgggtatttgctcggaaaatcaattcagaaagaacctgtcacatttttgcaaaaacttaaccctatacctgagcatctaatcgaactggcaatttacgcatacaaatattcttccaatgatgataaattaaaattatgggataagttttctgttataaaagataaaatgtctttgtatttggctgttaccacagattgcattcttttaaagaaagtaacaggtaattataaatgtgcaggattgaattctttccattttgaagatattaatatccttagtgaagaatgtaagtttgtagaaacttcgtttgtcgattctgtttttgagagatgcacttttgatgtaaacgctttttataatgttacatttacaggatgcaaatttattgattgtgatgtgaatagtgatttgtcttctggttctaacaatattcattgttatggatgcgatgactataacactggctttatatcttctttggtaaaagttacgacatcttctgttttgcagaaacaagaagatatagatctagagattgaaatacttagcaagtattttaaagttgatggaaaatctcccaaaatgaggtatatctctacccttagaaaagaatttggagaaaagaatttggatgtcgtttttgcaacttttgaattattaaagaaaaaaggaatgattctgattgacgggaataattcgcacatttcaaaatcaggtattgcatattatcataagaacatacaagtatgagtgcaggaaataaagttttgagggatatagttacagatttggaggctgtcttgaacaaatgtggcgtaatgtaccatgtgttttatcgtactaagtcagaaatgtctattaaaaataaacttgagaaaaaatctgaagaatatcgtaaagccaacaagaagatgcaagatttattggctcttcgtattactttgtattttacggatgatgtagaacttcttcacaactatctaaaaagtcagtccaattttgacagtgaatctgttgatgaagccgaagttgataaattctgtcccaaaagactaaatttaattatgcgtgttccaaataatcttcagcaagatatgaaagcggcaataaaagaaactggttatgaagatttaattgataacacttatgaagttcaaatcagaactattttatcggaaggttggcacgaagttgaacatgatttacgttataaatgcaaagaagagtggaatgaatttaaagaggaatccagacttctgaacggaatttatgctaccttggaaagtagtgaatggtcaatgcttacattatttgacagactttcatattcccagtataaaaataaagtttggaatagtatgttacgcaataagatgagagttcgttttgctgataaaggtttgtcagaagaactttgtaaatatttgtcaaacaataataaaactgcaaaattattgtatcgtgcaaatagaaccaaaatattgaaattagtaatggaaaaaggctttgcataccctctcacttatgatactgtgttacatcttatcaatcatattattgtaaaagataaaatattagcgaattttgaagataaagttttgaaacgagatatggatataatgtttggtgaattatagcagtagttgatattagcaccatttttactcactcaaataaacaaaaatggtgctttttatggtcttacttttttacatatgtatgctccatccgtggaacggttccatgactacggcaaaagattcatccggtctgctttagtagaattataagaaaaacttctgtcttgcatgagcccgttccaatacatgcagattgccgtatccgatggatttcagttctaccagcaggctcctgtattctttttccgtcgcgggcagtgtcccggagatgattcccttgtaatcggctgcgccatgctgtcccgcatgcatgtaggatgtgattgtattttcggattcgttccacggtatatatggaaagagagcaattaccccgccttccttgaaccgtctgaacactaccttaataggtgtttccatatcagtctgttgtctatccgtatataatcttatccatttccctatcgggaaacgtgcataattcttcgttggtacaatagtaacggatattctcgtcctgttcgacagcttcgtccaaaaggtttcgcatgtcattttccagttcatgtcccagctcctccaccgatatcgtataggtttccatgccggtcgtaatctcacgcgacgggtatgccttgcctttgtagaaaattgtaccgatctctatgtcttcgccacgcccggccatcctgtcaaggtattccttgataatatccccatgacacggatgcggtttacagaagcatcccagagtctttccctgcaactcatgaaccctgcgcctgtattccgcatcgttcaccagcctcctgtaaaaatattcgcggaatccggccagtgtcccgccccggatcatgtcctgcttcagcctgaacggattaccgaaatacccgtcttgccctttaccggcacgaccgatatacacatcgtatgcctccttacggatattcactactcttgtatgttttctgttatctgccatactcatttgatttttagttatgattccgttatgaaagtgaccttgtaggtcttacatgctttcccgaaagcgggattggtgtcaaattccttgtatgactcccaatccaccgacatggtgtagccgttcggaaagttttcggcgatgaacttggttatcattttcttgtcctcatcagacaggaacagttcctcccgggtgccgtactccaatgcaaaaatcgcccattcgggaatgttgtcccaaacgagcgtcttgctgttattgccattcataatcctgctgtttattgctgtgataccataagctctttgataatgtcgtcgagctctgtttcccacttgtccgttccgtcaatcagcgagggataggtaagctgtttccactgccggtaatcgaagagtttcatacgcagcggatagtagtcgaaaagtttccgaccttcggagaatactctcaaatggtttgtcccgacttccatcagcctcagaccataacgtccaatgatttcgtggaaccttttcatcggggtgaagttacttctgctcatacctttttatttttgagttaaacatttcacggctcgtgagccggtattttatttcttgcctgcctcgctgtcccgtgccggattgtgcaaggctttccggaaaaataccgcaagcggagcgcggaagatttttgcggaaacccgtaagggctcggccttgctcaatcctgacaggcacggggcgacctttgcaggctgaaataaaacagcggtatcctattcctccttcctgtcgctgtcttctttgggtatcaggtgctgtaaatcaggatcggtcttgatgcgttgcatttcatcttcaattatttgcagcacgtccgccttgatacgtgaatagttacgctctatctgctgctgcatgatgtcgttgccgtccgcatccttgaactcgttgatgacgggtatcttcttgtaggctttcgtttccgccgctactttctcgttgtcaactatgatacgggcatggaaaatcttctggtctatctcttccccgaagttgtccgccacactgcccacgaatgtgccctgcgagaggttggctatcttggatgccggtatcagcgagtccagctgcgtgttgatggaggtggatgtgtcctgcctgttgatggagatggactgccgttgctggagaatcttgccgaaacgttccgaaaggcttttggccgtttccccgaccacctgcccggagaagatattcccgactgtattttggatcactttcgcctctttttcaccgtagtcacgggtcagctgggagaagtcctggaaaccgagacagacagccaccttgttgcttcgggcggtggctatcaggttatcgataccacggaaatagatggtcggaagctcgtctatgatgatggaactcttgagttgccctttcttgtttaccagctttacaatgcggctgttgtacagtcccaatgccgccgaatagatgttctgtctgtccggattatttcccacgcaaaggattttcgggtgttcgggattgttcaggtccaatgtaaaatcatcgccggtcattacccagtatagctgcggtgaaatcatccttgaaagcgggatttttgcgctcgctatctggccctgtaactggtcctgtgcgcctccttgccaggcatccataaagggagagaggtagttttcgagggacgggtatgaggtcaggattgtaaatatatctgcgtacggtttattcagaaactctattgcgtgagggaaggtacagtatttgccatccttgtaaatccgcaaataccagataatggctgcgagcaggataatcggagattccacaaagaagtcaccctgtttctgaatccaggtcttgttcagattcaagagtatggtgtaggccgattcgtaagcgtcggatatgtccgccatgaatttcgggttgatgggattacagcggtggctgcgtctcgggtcatcaaaatttatcacgtagaattccggtctgaccctgtacttgtcaatgtttttaagcagttcgttataggcaatgaccgagaggtcatcaaatttgtaatcgtacaaatataaagcgaatcccttggaaatcatctgtttgatgtagttgttcaccaccgcgtaggacttcccactgccaggcgttccaagcacgatggacgcacgaaaaacgtttacaacgttgatccatccgtcccattccttgccctgatacacgaacttggtcggcaaatttacagaatactcgttttccatcaagtgtgtctcctgcatgaaactctcgttggcggtattgaacacgtcctccatcaggttgtgtttcagcatacggcttatccatacgcccgacatcaaaagaaggatgtacccggcggtcagcgttaccgtgtaaatggcggcgtcaactgtcggactgaacggcaggtcgaacatccaccagttcatgaagaacaatacaagccccgaaaggaaggcggtatatattttccgccaggtcatcttctggtttttcacgcccttcgtgcccaaacatgacagcgcaaggaatatgacggcgaacacttttgtcaccagcaggttgctgaaaagccccgccgtcctctggaaattcagtagtatcttatcgaccactccgatattgatacccgcatccacgaatgcccggtaacagaaccaatagacgtggatgacaacaaacacgatggatatggcacgcatgaattccatgacctttgccagtcctctcaaatcatcttcctgttgcataacgatataattttaatggtgaatgaatattgtttttaggagatgccccgtgagcggcgtttctttttcttcttgtgatacagcctgcgtgcaagagcctcttcctgcgggtcgggaccgtttgcttcaaagtcgaagatcccgaaagcctgttctatggcactttccatgtcggaggagaatccgctttgcagaccggtgtccggcatgggcgcatccagattcgggatattgcccggattattaaagaggcgctcaaaggcatttgccgagaactcctttccgagccgcgagccgttatagacctccctgttcctgtggtcgatgaaggtcgcgccgtaaatgcgtccttccccgttctcccggaacaccacgtctattccccggccgttcaagaggcggatgaaatcctcccggttgccacggcatccatgcatggcgagtgcaatctcgttccgtattttgggctgccgttttttgttcttgtattcacgggtattgtaaccaatacgcttttccagtccttcataaccgaagcgttttccgataagggaggacttgatgggcgtacataccggtttgcctgtattgtctgtcatggtatagacaatgccgttgtaaggtgtcccttcaaattcgcccctaacctgtttcgcctcgatgttaaagcaggacagcaacgcgctgtactctccgaatgactggaaacggtaagtggagaacacgcttttaaggatgttggaaacctgttgctttacatcgccattctgatagtccgctttcttcagatatggttccagcagttccctgcgtttgtcctccacctgtttcagaccgaattttctttccagttcccgacaggccttcatcgagcggttccattcgtaggcatcgtcaatcttttcccctttctcgttcacgcaggtggaaacgatatggatatgcctgcggccgatgtcctcgtgaatatatacaatgtaaggctggtcgccgtagcccatgcgttgcatatactcccttgccaaatccgcaaattgggaatcggtgagacggtcatccaccgaaggattgagcgatatgtgtagcaccggcttctccgtgttcctgttggcaagcaggtaattttcgaatgcccagagcgtgttcctcatgacctgttccggattgcccgtgacatcggcaatcatgcggtttcccgaaatgatgcgtgccgttgactcgttcactttctgctggttgtagatgacagccccgtagagcgacgcgcccctgttgatttttgccaccatgtcattcctcctccctctgttttttgataaggtaggtttcttcaaactcacgggttagcatgatgatccgcttgctcagcaccaccagatctatggtcaccttttccagattgcgaagcagggcgtatgcccgtttctccccgaaattggtcttgattgcctttaccgcctggttgtagttgttgcctacggcctggaactgatggtagaaattggtaagacggacgtagtagtccattgctgccttgtcgattctgaccaccttgatttccttgttcagaagtaccgatttaataaacctcgcacggtaagccatacccgatttctggaatgagagttcaaattgcgcgttctcccgtgaattgaatttgataccgtagcggtacacggcagggtcggattttgatttccgccctacaccttttcttgcttttctgttcttgttttcttccatacgcattgagttttttcagtttctgatcttccgtcatggatttccgactttggaggaaatccctcccgagccgtcaggcgagcggcaagttgttttgggttgcccgaaatatttcgggctgccgaaaacacaacttgctattaccgcttggtaatgaattttccttcgtcaaattgtgttttgaccttcagcctcattcttcggcttcggaaagccctcgcagccgtatccgttccgttgtcggtgcaaagttatggcagtttattctgttgtaaaatagcaagttatatgtaacatgatgacatatggtgacacaggtcgtcacctcccttgaaacatggtggaagtatgggaaaataccattttatttgcagcgtgaacggtaaaacaaaccaatagtcaagtaactgtccgttgtattgccggttagcgaaagcacttgttgtaacaggcgggtaatgattggatgcttgctttgttaaggcagagaactatcggttggtcggtttgccggttggtgagcacaaagcaaccgtatcactaacaaaccatgtcacaaagcaaacaacagacaagtaaaacaatagtataataaaccattaaaaaagttcagttatgaagaagaatccgttattcgttgcggtcagcaatcaaaagggtggggtcggcaaaagtaccatgttgataacgcttgccagtctcctgaattattcgatgggcaagaatgtggccatcgttgattgtgactccacccagcgtagcctgttcaatctgagggaacgggacatggagatggtggagataaacaagaagtacatggtgttgctggaggaacagagactcaggggatgtaggatttatcctatcaggcaggcaaaaccggagaatgcacgccaggtggccggagagttggcggcaaaagcagattttgatatcgttttcatagatctgccgggatctatggacatatccggcgttttgcagaccattttcaatgtggattatgtattgacccccattgccgctgacaattttgtcatggacagcagttttgtctttgccaaaagcgtcatgaagtgtgcggaaaaccggaataacattcccttaaaagacgtgttcctgttctggaccaaggtcaagaaaagaagcaacaccgaggtgcttgacaactatatggcactgatgaagaaacaggggttgaaaattctggattcaatgattcccgatctctgccgctatgacaaggaactgtcatcccggacacgcacctatttccgctgttcgctccttccaccgccggcaggacagcttaaaggcagcggattgcaggaactggcaaacgaactgattgtaaaatttaacctgtaattgagatatggcaaagaaaattgtaaaagtgaatgaagaaaaaatcagggggtatatggtcggtgacattcctgatgccatcgagaacgaggatatcatagtggttgaggttccggaagagggaaacaatgaaaggcaggatacggaaaaagaaactgcccggaaaaattccaaatcttgcaatatgcctaaaagtgacagtaactttcgtcaaaagtatctggtgaatacccccatgcccggacgtatccaggtgtacctgaaccgcaagctgtacgacgagataaagaattatctcaatgtgatagctcccgaagtaagtattgcgagctatatcagtaacatcatagccgagcatatagaactcaacatcgaggaaatcacccgaatgtataaagaccgtttttcaccccctaaaattcaatagtcatggaaacaacattaatttatttttcagtaaaagccgtgtcggcaacttatatattatataaggtatggatgtttatattcagtccgaaagtttataaattctggaacaatcagcttcgttatatgcgcattgcacgtatccggttatggaaatcacgcaaaaaacggatggcggaaaaagcaaggaaagcccggtatagggcaagactggacaaggctgaagcatggatcgcacaagcggagaacgatatccttaaagtcgggcatgaaaagaataccgaaacgcagccgaatcccctgaacgagtacaatgaagtaatcggcaagacgaagatagtctatcttgaagacccggaagtggcgagaaaaactcccacacgttctgagcctatgaaaaaggaacccatagaggaggatgaggatataaatccggatgacgtgattgatgactttactcccaaaaaaggactgacagaatcggaaaaacgggaacttatgtcaaatgacgggtgcgttcctgacccggatttttcaagggcattgacttttgaggaactggacaatgtcgctgatgtgcttatttcggggacggatgacagaaagaaaatccgaaatgctgccgaaaccttgtaccaacttcaggatacagacctgttcaggttcttttcaaccgaattgagtactcaaagccaattggaaaaactgcttagggaaaatatgccaaatggaaaagagacatcaaaacagtctttggaacagattggaattgattggaataaatacatgtaaatatggaatcgaatgagaaaaacaaaaaaacaacaagcaatgccgaagtcagaagcagaatcttttggcataaaaagaaatcctgcaattcgtgccccacgcatctatctatctgaagaagaagtcatcagaattatgcggaaagaagccgctatcaaaaagaagataggaaatcttattgatagtatgctttgtgatgattcacaaatttcagcaatggataatataaaaaataagacagaggcattcgatatagatgaattcgtttaattgtttctttttgctgtcatagtttcagaaggcatgtcgatgtgatatcggtgtgctttctctatgtcagattccttttccggttctgaggtgtagacaatgtataaaacgtgtaaaatgaacagaagcgaagtgtgaaagccggctttcacacttcgcttttccattccaatacagacagccgctatttcatcctttcataaagattgagaccggtttgccgctttcaaacgccttgctcaccgtgtagtatgttccccctttcggctaaagattcccaataggctatgactgtatccgctttacgcaccatgtattcattcctgcgaaagtagccgcggaaacggggctgcctttgccggaaggaatgaaattccactttcttcttatccctgtttttctgtttaacattgatggaaaagccctttttgaacagctcaaaatctttttccgatgtaacgtgatgtcatacggtgtcacatatcgtatagtctgtaaatcaataaattaagcattatatattcgcagtcgaaatcattttttgtttcaccaattaaaagtttcgacacatgaaaaaaagattctttttggcagccatgacgctgctggtttcaatgggggcatccgcccagggcaacggtatcggtggaattacggaagctaccaatatggtcacttcgtatttcgatcccggcaccaagctgatttacgccatcggtgccgttatcggccttatcggaggcgtgaaagtctattccaagttctcgtcaggtgacccggacacctcaaagactgccgccagctggttcggtgcgtgtatcttcctgattgtcgctgccaccatcttacgctcattcttcctgtaatatggcggaattcaatgtcaacaaggggattgggcgcagcccggagttcaagggactcaagagccagtacctgttcatctttgcgggaggattgctcgcgttgttcgtaatcttcgtcgtcatgtacatggcaggtatcgaccagtgggtctgcatcggtttcggggtcgtttccgcatcggtgctggtctggggcactttcaggatgaattcgaaatacggtgaatggggccttatgaaactccatgcgctgcgcagccatccccgctacatcatcagccggagaaagttcctccggttgttttctccaaccattaaaaacagaaaagcatgaaaaacgtaatgaaaacagccacgctggaaagcaagtttccgctgttggccgtggagaacggctgcatcatcagcaaggatgcggacatcaccgtggcataccgggtggaactgccggaactgttcacgctgacacgtgccgagtacgagtccatgcactccacctgggcaaaagcggtaaaggtcttgccgaactacagcatcgtacacaagcaggacttcttcatcgaagagggatataagccggatatctgcaaggaagacctgagctttctgagccgcagtttcgaacgccatttcaacgagcggccgtatttgcagcatacctgttacctgttccttacgaaaaccacgaaggaacacagccggacaaccagcagtttcaatgcacttacaaggggattcattatccccaaggaaatgcaggacaaggaaaccgtcacccggttcatggagtgctgcggacaattcgaacgcatcgtaaacgacagcggcctgctacgtatcatccgcctgacggatgaggagatcatcgggagcaacaattccgccggcatcatcgagaagtatttttccatgtcgcaggaagatgctacctgcttgcaggatctgtcactcggtgccggagaaatgaaggtgggcgacaactacctgtgccttcatacgctttccgatccggaagacctgccgtcgaacgtgtcaaccgattgccggtatgaaaggctctcgacagaccggagcgactgccggctgtcctttgccgcaccgataggcatcctgcttacctgcaaccatgtggtgaaccagtatctcttcattgatgattcggctgaaattctcaggaaattcgagcagaccgcacggaacatgcactcgctttcccgttacagccgttccaaccagatcaaccgcgaatggattgaggagtacctgaacgaggcacacagcaaagggctggtttccatccgtgcgcactgcaatgtcatggcatggagcgatgaccgggaaaagttgaagcgcatcaagaacgatgtgggcagccagctggcgttgatggaagccaaaccgcgccacaacacggtggatgtgccgaccctcttctgggcggcaatacccggcaatgccggagatttcccgtccgaggagagtttccacacctttatcgagcaggccctgtgcctgttcatcggggaaacctcctacaaggactcgctctccccgtttggcatccgtatggtggaccgcctgaccggaaaacccgtccatctggatatttccgacctgccgatgaagaacggcacaatcacgaaccggaacaaattcatcctcggaccttcgggcagcgggaaatcttttttcaccaaccacatggtacgccagtattacgagcagggtgcgcatgtgctgttggtggataccggaaactcctatcagggactgtgcagccttatccatgccaggacacacggcgaggacgggatttattttacttatgaagaaaaagatccgatagctttcaatcctttttacgtggaagacgggattttcgatatcgagaagaaagaatccgtcaagacgcttatccttaccctgtggaagcgtgacgacgagccgccgacacgtgccgaggaggtggcgctatccaatgcggtcaatctctttctggagaaaatccgcagggacagcagcataaaaccctccttcaataccttctatgagtttatccgtgacgagtatcaggatatcctaaaagagaagcgaacccgtgagaaggattttgacgtatggggattcctcaatgtattggagccttactacaaaggtggcgagtatgactacctgcttaactctgacaaacagcttgatttacagagtaaacgcttcatagtttttgaattggacaatatcaaggacaataaagtactcttcccgatagtcaccattatcatcatggaaaccttcatcaacaaaatgagaaagttgaaaggaatccgcaagatgatattattggaagaagcctggaaagccattagcaaggagggtatggcggaatatcttcggtacctcttcaagaccgtcagaaagtttttcggtgaggccgtggtcgtgacccaggaagtggaggacatcatttcttccccgattgtcaagggtaccatcattaataatagtgactgtaagattctccttgaccagcgcaagtatatgaacaagttcgatgagatccaagcgttgctcggtctgaccgacaaggagcgggcgcagatactttccatcaacatggcaaacaatccttcccgaaagtacaaggaagtgtggattggtctcggaggctcacagtcagcagtctatgccaccgaggtgtcgcttgaagaatatatggtgcgcccgtaaagggaatttgacgaatgtcgctttggcaagcgactgggcaagtgtttaaaatgcccattaacaaccgctaaccggaggggaaaaccccacaagggaacatagcacgttggtaaagccataagtcagccaactgtcaggctgcgaccgaatggcaagttaaaatgatagatatgaggataaagcctgcattggttgaacgatagtccgagcagtcgtatccttgggcaatgacggaagacagttgaataattcttcggaattataccgttatgttgcggtactacactgatgacacgtagcaggagtagcataaacttaccgcaaggcaactaccataagtagtaaaggacgaaagtcgtatccgacaatctatcgagccaaatagtcgtcaaatttctaaacggggattgcctaaaccggaaagccagttgtagggctatggggtctgcccctgaatatctggcatggcaacggagcttccatagtagtctgagcagggtaacgccctgtacatggcgaaggggagcagctaattaagtttaacaatttaaaggaagatgtgagagacatgagaaatccagaaaatgtgttgaacagtctgagtaaacacagcggtaacttgaactataagtttgagcggctgtatagagtgctgtttaacgaggaaatgttttatgtagcctatcagaatatttacagcaagacaggcaacatgacggcaggagccgatggtaaaaccattgacggaatgagtattgaccgagttgaacaactgattggcagtcttaaaaatgagacttatcagcctaatccgtccaaaaggacgtacatacctaagaaaaacgggaaaaaacgtccgcttggcataccctcttttgatgataagctggtacaggaagtagtcagaatgatacttgaagcaatctatgaaggtagttttgaacatacttcacatgggtttcgtcccaaacgaagttgtcatactgctcttatagatatacaaaagacattcactgccgtgaaatggtttattgaaggcgatattaaaggattcttcgacaatatcaatcatgacgtactgattaatattcttcgggaacgtatcgccgacgagagatttttgcggcttatcagaaaattcctgaatgccggatatgtggaagactgggtatttcatagaacgtacagtggaactccgcaaggcgggattatcagcccaatactggctaacatctaccttgacaagttcgacaagtacatcaaggaatacatcaatcggttcaataaaggggtaacaagaaaaggcgacgctcgatacaagctctacgaacagcgaagataccgactggcaaagaaactaaagaatgagaaagatgtaaaggtaaggaaacagatgaccgccgaaattaagcggctacgagaagaacggaacaactatccggcacgtaatgaaatggacagcagtatcaaacggttaaaatacgtgagatacgcagatgactttctgattggaattaccggtaatcttgaagactgcaaaacagtaaaagaggatattaagaattatttgaatgaagctcttaaactggaactgtcagacgaaaagacactgataaccaatgcgcagaaaccagcgaaatttctcggatatgacgtatttatacgtaggtgtaacgatttacgtaaggataagtacggtaaaacggttcgtgcattcggacacaagcctgtattgtacctgaattttgaaacgatgcggaagaaactctttgattataaagccgcaagaatcgcggtcgtcaatggcaaagaggtttggaaatccatcgtcagaacgtacatgctgaacttggatgacttggaaatagtcagtcagttcaatgccgaaatccgagggttctataattactactcaatagccaataacagctatgtcatcaattctttctatcacattatgtcatacagcatgtataaggtatttgcgaacaaatacaaatcatctgtaaagaaaatacttctgaaatataaaaagaacaaggttttccaagtggcatatgaaaatagcaagggtaagacactttaccaatcattttatcatgatggtttcaaacgcaaaaaggttgcagggaatatttactgtgacactattccacggacagtttccataacaggtggacgtaacagccttatggaaaggctgaagctccaagtttgcgaattatgcggtgctaccgataaactcgaaatgcatcacgttcgcaaacttaaagacctgaaaggtaaatccgactgggaaaagaaaatgatagctcgaagacgaaaaactttggctgtctgctcaaagtgtcatgcaaaaatagaccccgaccgaagaatcagactgaattaattagtggagagccggatacagggagacttgtaagtccggttcggaggcgagtactcggaaacctaccatagaaatatgacaaggcgctgggtgcttagcctactgctacaccactgaagaaacggaaaaactggaactcatgcgccttacggacaaactcggcggcaacatagagcttgcaataaggcagctcgcagagagcaaacgtaacagtaagtaacattcaaaaatcaagaaagacatgaaatttaccgaatggataagacatcggattgtcggtcgcttccgggaaccggaccaccgggaattgcaggagattgctcaaaaagccaaacgtcttgccggtgtgtacaatcacggggaacttgcaaagcttatccgggagtacagtcattcggaaaaagctattgaacagatcgccctgctgatagcgaaatccgaacccttcgattctcccatatcaacgatgaacaaggaatccgtagatatgatggatgtattgacggatactccatttatggcgaaacacggctctcaactgacggatatcccaccatgggaagccacatcagtgcatggtttgttcgcaatgtacaccattatgcgtgattggggatgtacgaaatatccgatgaatagaattgaacgcccgccacatagtgaagtaatatccgcaataagaatattggacttccagagaaagagccgggatgtatctgaactatgcgaactcgcctcatacagcatggtgccatcgacctacgtcaagctgcgctatggcattgaggacaaatgcagtacctatgaatggctcgaaagctatctgatggacagggatgactgctgcattgagcctgatgtcaggatgaacattccccgtatagaagccgagatgtgcgcggcggctgaaaaggcggtcgagaatatccccggagtccgtctgccggacttctatcttgagggacttgaccgggagcttgacaaattggggcgtatcgccgtgtcaccggatgcttcaaacgaccttatcaatgtgcaaccggattttctggtcaaatacggtattgacaagaccgcagccccggaagaacaatcccgtcaggcacagaaagcctacaaagaactggataacagattagtccgggttaccagccgcagaccttatgctgacgaattcttcgcatccctcagacacgggaaagaaaaagtggcagaggtagaccgtccgagaccggtgcacaagcctatcctccgtaatccgccgtccaaagggcgaaaaatgggactttgactttcaacagatttttattcaccattaaaacagaaacatcatgaaaaagaaaattctcatgctgtgcatgggctgcttccttgccagcctcacagcaaaagcgcaatgggtcgtgagcgacccgggcaatctagcacagggcatcatcaatgccgccaagaacattgttcacacgtcctccacagccactaatatggcgaataattttcaggagactgtaaaaatctacaagcagggcaaggagtattacgacggattgcgcaaggtcaagaaccttgtccgggatgcccgcaaagtccagcagaccgtcctgatggtgggagatatcacggacatctatgtcaccaacttcgagcgtatgctcagcgatccgtattttacaccggaagaactgagtgccattgcccttgggtacaccaaactgctggaagaaagtgcccacctgctgaacgacctgaagacggtggtcaacgagaacggcctttcgatgaacgacaaggaacgtatggacattatcgaccgctgctacaacgacatgctgcaaaaccgtagcctggtgcagtattacaccaacaagaacatcggggtgtcctacctgcgcgccaagaaacggaacgacctggaccgcgtgatggcactctacggctcaccgaacgaacgttattggtaattattcctaatccgctttcattatgttattgttggctatagattttgacaacctgcatcagattttacagaatctgtatgtggaaatgatgccgctctgctcaaagatgaccggtgtggcaagaggccttgccggtttgggagcgcttttctatgtggcgtatcgcgtatggcaggctctggcccgtgccgagcctgtggatgtctttccacttttgcgtccgttcgccttggggctttgtatcatgttctttccgacactcgttctgggtacgctgaacagcatcctctcgcccgtcgtgaaagggacccataccatattggagtcgcagacctttgacatgaacgagtacagggcgcagaaggacaagctggagactgaggcgatgaaacggaatcccgagacagcctatctggtcgacaaggagacttttgacaacaggctggacgagctgggcgcgtttgacgctatagaagcttgcggaatgtatgtggaccgtgccatgtacaacatgaaaagggccgtgcagaatttcttccgcgaactgctggaactcctgttcaatgcggcggcgctggtcatcgacacgctgaggacattcttcctgatcgtgctttcgatactcggtcccgtttcctttgccatctcctgctgggacggtttccaggcttctctcagccagtggttcgtccgctacatcagtatctacctgtggcttcccgtaagcgacctgttcagcagcgtgctggcgagaatccaggtattgatgctgcagagggacatcgaacagctttccgacccggatttcatccccgacagctcaaacggggtttacatcactttcctcattatcggcatcatcgggtatttcaccatcccgaccgtatcgaactggattgtgcaggccggaggcggtgcgggcaattatggaaagaacgtgaaccaggcggcatccaagacaggctccgtggtggccgggactgccggagcggcggtgggaaacattgccggcaggcttatcaagtaataacagtataaaacatttacagaatggaattcaaatcattgaaaaatatcgagaccagcttccgacacctgcgtctgttcggaatcgtctatctgtgtgtatgcaccctgcttgtgggattttccgtatggaaggcttacagcttcgcggaagcgcaacgggagaagatctatgtgctggatgaaggcaagtcactgatgctggccctttcacaagacctggagctgaaccgcccggtagaggcaagggagcatgtcagacggttccacgaactgttctttacgctctcgcctgacaagaatgcgattgaaggcaatatccggagggccatgttcctcagtgaccgttccgcctatgcccattatgtggatctggcagagcagggatattacaaccggataatttccggtaacgtgaaccagcgtgtagggattgacagcgtcaagtgcgatttccatacctatccgtatgaggtcgtgacctacgcgaagctttccattatcagggagaagagcgtgaccgagcgcagcctcgtcacgcggggcaggctgctgaactccacccgtagcgacaataatccgcacggcttcatcctcgaagccttccgtgtggtggagaacagggatataagagtgtatgaccgttaaaattcagaatgtatgaaaaagatgtttgtaaaaatcaaggaatccgtggaagaaaagctgcggaagctgtgttccgggcttagcccggaaaagagagtgccggcaattgtcgtgctggctgccctgtttgccatcggaaatttctatatgattttccgtgccatccatgacatcggacgggaggatgtacggccggaaatcatagagatacccccgatggaaattccggatatcgttcctgccgatacactcccggataaaagggtgcaggaaatggaagagttttttaaccgattcaatcagaaagaaaatgggtaatgatgtcaataaattgaaacagaggctggaaatcaggaaatacctggtttttgccgggatgttcctcctgttcctcggggcgatgtggctcattttcgcaccgtccgaagaggaaaaaaggaaagaggaaaaaaatgcgggattcaacaccgagcttcccgatccgaggggagcgggcatagaaggggacaagattgccgcctatgagcaggctgacatgaaacgcaaacagacggaaaaactgcgtacgctggaggatttctccgagatggcagatgggaactccgggactgtcgtggaattgtcaccggatgcggatgccaaggatggcagttcacgtgaaggtgacagaaggaatgaagcctgttcttcatccgtctccgcctacaatgacatcaacaggacgctcggcaacttttacgagtcgcctcaggaagatccggagaaggaggctttgaaagccgaggtggaacaactcaagcaggcggtcgccacacagaacgcgcagccgggttacgaggagcaggtggctctcttggaaaaatcctatgagcttgcggccaggtatatgccgggcaatggcggtgtgaatacggacagccgttccgataatgaaagtcccgggcggaacggaaaggcgaaagccgttcccgtgggactggtttccacaccggtggtatcatcgttgccgcaaccggtcagtgattctatacagcttacgggaatggcacaaccggaaagattccacacgccaatcggtaataaagaagagagaaacgtgaggaataccatccgggcctgcatccacggggaccagaccgtcatcagcggtcagggagtgaggatgagactgctggagccgatgcgtgtagggaagcatatcctgcccaaaaactccctgcttaccggagaagggcgcatacagggtgaaaggcttcacgtcaatatccttcaggtggaatatggcggtatcatcatccccgtggaacttgccgtgtatgacaatgacgggcagggcggcatattcattccggggtcaatggaggctaacgctgtcagggaggttgccgccaatctggggcagaatctcggcacgagcatctccatcaccaaccagtcggcaggcgaccagctgctttccgaactcggaaagggtgccatacaaggtgtctcgcagtatatatcccggaagatgcgtgaggagaaggtgcatctcaagtcaggctataccctgatgctttatcaagacaacgatcaataacaatccattaaaattcaatcgacatgaaaaagttttttgtaatgcttgcccttgcatggggcactgtgggtgctttcgcccaaaatgaagccgacagcgtagcggcggtaaacaatgccatcacactggccaaggatgtgtatcctcaaaaagaggaggacggagacctctatcacggtctgacccgtaaactcacctttgacaggatgatacctccatacgggctggaagtgacctatggaaagaccacgcacatcattttcccgtcatcggtgcgttatgtggacctcggttctccgaacctcattgcaggcaaggcggacggtgcggagaatgtcatccgtgtaaaggccaccgtgaaggacttccgtgaggagaccaacatgtccgtgattaccgaaagcggaagtttttacaccttcaatgtgaagtatgcggaagagccgctgctgctgaatatcgagatgaaggatttcattcatgacggaagtgaggtgaaccgccccaacaacacccttgacatctacctgaaggaattgggctgcgaatcgcctaaattggtacaccttatctcgaagtccatccacaaggacaacagacggcacatcaagcatatcgggtgcaaggcgttcggcatccagtacctgctccgcggactctatacgcacaacggcctgctttattttcatacacagataaagaaccgctccaacgtgccttatgaggtggatttcgtgacttttaaaattgtggacaagaagctgatgaaacgtaccgccatccaggaacaggtgatattcccactgcgtgcttacgactatgtaacgtccgtcgcgggaaaaaaggacgggcgcaccgtttttgtcttcgacaaattcaccatcccctcggacaaggtactggtggtggagatgcacgagaaaggcggtggcagacaccagaccttcaccgtggaaagtgaggacatcgtgagagccggggttatcaacgaacttaaagtgaagtagccatgaagaagtatctgttcctttttgttacagtcgtgtcgcttgccctgttttcagggcgggcgcacgcccagcggtacctgcccgggatgaagggcgtggaactgcgcggaggatttgcgaacggctcaaagtcccccttgaattattataccggatttgccgtttccggatacaccccaaaagccaaccgctgggtcataggcgccgagtatctgatgaagaactacgggtatcggaatgcgagcgtaccccgtgcgcagttcacggcagaaggcggctattacctgaaattcctgtctgatccgacaaagacggtcttcctctcggtcggcggttccgcactggccggctatgaaaccgtgaattggggagacaggatgctgtttgacggttcaacgctgctcgccaaggatgcgtttgtctatggcggcgcgataaccctggagcttgaggcatacctgacagaccgcatcgtccttcttgccggtatccgggaacgtgtattgtggggaagctcgctggacctgttcacgacacagttcggtctgggcgtaaaattcataatccattaaaaccgtaccgcttatgactatagaagagataagagacattcctatcgccgtttttctggcacggatgggatatgaaccggcaagaagacggggggatgaatattggtatctggccccgtatcgggaggagcgcaccgcctcgttccagctgaatgtccgtaaagatatatggcatgacttcggtaccggacagggaggcgacatattcacccttgccggggagtttatcggcagcggggatttcaaggcgcaggccaggttcataacagagatatggggcggtcttgctcccgaacacaagaccgttttccgctccggggaaaatgacagggaggattcccataggcaggaaagtttcacgaaggtacagtccggaccgctgcacaacagagtcctgctccgttatctggcggaacgtggcattagcggtgatgtggctatgccgaactgcaaggagatcaggtataccttgcacgggaagcggtatttcgccatcggtttcaggaatgtcagcggtggatacgaggtgcgcaaccgcttttttaaggccagtctctccccgaaagacatttcgctgatggacaacggttcggatacttgcaatctcttcgaggggtttatcgactgcctctcgtggatgcaactcgaattgggatgtggcgacgactatctcgtactgaactcggtggcattgctggaacgctcgttccccgttcttgacaggtatgagagagtcaactgttacctggaccgggacgaagccggacggcgcacgctggaggctctccgcaaacgctacgcggataaaatagtggactgttcctctttgtacaaaggatacaaggatctgaacgaatacctgcaaaacaagtttctgtaaaaatagaattaagtataacgttttaaaatctgattgaatatgaatgcattgaataaaaaaagaggattggtcggaatgacggcaatcctgttcctgggtctggtggcttgtctgttgtccgcctgcaatgatgaagtggatgtacagcagtcctatccgttcaaggtggagaccctgcctgtccccacacgtattgtgaaaggcgagacggtggaaatacggtgtgaactcaaacgtgagggacggttttccgatgcccgctacaccatccgatatttccagccggacggcaagggtacgctccgtatggatgacgggatggtgctgctgcccaatgaccgctatccccttgacagggaggtgttcaggctatactacacttctgaaagcgaggaccagcagacgatagacatctatttcgaggacaatagcgaaccggcacagctttgccaattgacttttgacttcaacaacgagacggaggacgaggattccgtcgtgactgcggatagtaaggaattgccggtcacaacagtcagacactaagccggtcctgcctatgatgaagttaaaagcaatatggtttgcggtgctttccgctgcggtctttttttcaggtatgccttcaagggcggagaatccggtaaaggcaagtccggacaagttcagtcttgcggtcgagtgtgtcaagcgattcgagggttggcatggagagaaaaagcattggccttatgtcgggtggggtcacaaagttcttcccggggagaggtttaccaacggtattacaaaagcacagggcgattccattctgagagcagacctccgtaagttgtgccgcatgttcagttatctgggacgtgattctttgttggcagcagtcctttcatataatgtgggaccctacagattaaaaggatatgggaaaagaccgaagagccggctgttgaagaaactggagtcgggcgaccgtaatatttacaaggaatatgtctctttcaggtgctataaagggaaagtggttccgagcatcgaacggagaaggaaggtggaattcatgctgctttttgaagagtaattgaaaaagggagaacctttcagttgttatcactgtcaggttctcccttatttctttggtttgagaagcttgcatgtcagtttacctgaacggcatcctgtacttccagctcttccggcagacgggaaagcaggagttccgccatggctccgttctgtggaataagggccgggaagtctgtctttccgggcttgtatatctctgtggctatattgtataattcccaagcggtaatctgtcctttgctcatggccagtttaagcacctcttccgtgaagatggaaatctgtccctggttcagtggataggtttccacggaggatgagaggtccctgtccgaactgtcgtgggagacacgcaacgcggtcagcagacctatgtacatatagatttcctccatagatataatccggcgtttcaaccgttgtatgcgttcgatgtcctcgttcatgttcacctcgaaattggccagccaaccatccacggtttcgaacacctcttccgtcgagactttcttcttgccgtaattgcagacgcttcgctcgggtgaaaggatacactggttatgacagattagcacgcaggggcctatggctgcctgtatgccgtcctggtggtaggcgatgaccaatgtcgtggtcagttcgtccgtctcccaatccttgatccggatggtagcgaaaatacggcgcaggatatgggcttccacggctttttcgccatgtgtctgttcaacctgcgggaggatgctcactcccggctgtgtcttgttcctgttctgggcagcgaagatttcttccacctcatagtcgagattgtatttctcgcagatgtccatcatgcgccggatgacctggtaatggtagatgccctgcaccggattgttgtagatgtcattctctttataggtgcgttgaagtgtctcgaagttcatcacttcaattccgtttttctggaagtcaaactgctgttgtctttccattactgccaatgtcgtttccatattgaattgaattttataaagttaatattgtcgtttgcctctcatcaggtgtgtatctgccatccatggaacggctgtagtgtcacggcgaaagaacggtccggtattccgtgatagagcagaccgcccacgatgcctgtccttccgtcgggatagcgttgggtgaagccgaacgagtacggggcatggtcatagtagagtgagatttcgctgggacagtcaggattttcttcccagctcttcaaccgttccaggcatttctggagtgagatgtcaccgatggattcggcataacgctttacattctcgaaatgttcttcattcaggattttcatgattcattgtattttatctgttaaacacgtccggctccgggagccggtatttttatttctcgcctgcttgactgtcccgtggcagtacccgcaaggtttggcgaaagaaaataccgcagccgtcaggcgaggatgattttctttcagccaaccccgcaaggggcctgaccttgacagggtacaccggacacgggactacctttgcagggtgggaaataaaatacacggtagtgtgctttgcatggtctgtggcgattctcttcctgatttgttcgccattgccggacaaatggtgtatttttgtaatttctaatttcaggcttatggaaaactatataaagaaagcggcggatgctttccttgtggagcgtccgtacggtatgcgtgtggattacaggaagaaaggattcgtgctgtttaaccgtaacctcaatgtgttgggaaatgcggaacagacccgtctggaagaactgcctctggagcggttcaatgtggaggagattccgttggagggtgaagtcgtggaggaacacgcaggatttaccgatgtattcttctataccgatctgaccaatccctatgccggatatgtactgaatttgcaaaagcttaaagcctataaccggtttatgtttccgctggcaatggcgctgaaccgtgagttgtgaggccggaagatggcagcggtaacagttgcatgaagcaggccgttaccgccagcatttattgtttgccctctttttctgttatgaacgcaagataggcggacacggccttatggcatccggtaaagtccggagtccggtgacctttgattttccggtaactgatggttccttccttatttatgcccataacatgcctgttgaatgtccctttggttctgatatggatgtcaaaaccgtcccttccggtgatttcaaggaacattcctcccgtgatccgttccccgtccaggaatttctgtttctgttcatcgagcagccgctgatgttgctcttcccgcgctctgcgctcttccgcctctttctcctcccactccctgcgtttctgttcctgcttccttttgtacgcctcacgggcttgcaccaagggggtggcgtcaagtccgagagcctcgaacacgcggacggagatcaacctgacgaaggttcctctttcgtaagtattcgataaactccctcgtatattgggtaacgtatgttcataatgtcgtttattcattttatcgttctatgatttattgttacatcaattcaacccaaagatgtgcgggttctatagtaattgatattatccctactaatggagcggataaaaggaagtttttcccctttgccccttattttcctgtgacaaatgtgataaagcgatatttttatccctactttcccgccataattggtataaaagggtattctttcccttattttccctatttatcggggataatgaagataaaaacggcactttattccctattttcccgtcttgattggcataaaacggtagttttcccgtgtttaggcgagatttacgaaggtatcaggagtctttcttgggagattccggtgacgtaacggataatatcttgcccttggataacagattgtcaggtaacaattcggccagatccatcgagtagtcatcgtcataatcatgtatatgttcaaggaagtagatcagccacgtgcggaagtcagccccggcagccttgcagcagccgaagaacgagtagagcaccgccgcatcttcagcggcatcattattgccacagaacaggtaattacgtctgccgcacgcgacaggccgcactttattttctatctcgttattatccggtctgtaacgaccgtccagatggtacctggagagtttgtcgaaccttccgtatgtatattttatggcttttccgatcggactgtctttcattactttgggatattcattgaccagccatttctcgaagcgcacaagtatgggatatgcaagacgtgccctaagttcagccctctgttcgtaagtcaggcgttcatcgtcagccttacgctccacgtcataaagcaactgtatctgtgcgagcgcatagtcggcacgctgcatgtcattctttcttgcctcccaaaaatgtctgcgtgcatgggcccaacagccaagaaggataatacctttcttggcgtccagcatctcgtacctttcgtatccgtccgtctgtatggctccccggaacttgccgaagagtttcagcaccacctttccacttcgggaacccttgtcatagtaaaagaactgacgtccggtcatgacactgcgcacaagccagatataacctttgaccgtcttgtgtctctcgtcattcatcacggggattgtcgtttcatccgactgtatgtagtcagtctgcatcaccagctcccataatcggaagtaaaggggccttagcaaatccgccacatccttgaaccagtcgttgaccgttgacgcggggagatgtacccccacacgtttgaactgttccagttgcctgtggaacggtatgtgatccacatatttccctatcatcatgtctgccagcaatgaggcagaggcatagctctttgctattggcatgacgggaagcgggccggtcttgaactcgtttgtacccttccgtttggctgtatggcgcactatcctgcggatatagaacttctcgggctcgtgcataaggatctcggtcacttcctctccgggaaggagcgtccactcttccggattatacccttcgggatatatatggaccacctcacgctcaagattctccggaagggattttctcgcaggatgctgcttccccgcttttttacgggcgatgatcgcttctctggtagccttcaactccttttctgcttcttctgcggcttcagcctcctggggaagcatgtcaaagccttcaaaatccagccagcggtcctgggcgtcaggctttatgaacttttccgccttcttaccgtacaactgccgttcaagataggatacacgttgctccagactgttgatttttgcttccttttgggcgattatggcatccttgtcagacaataaagcctcatacacctctttgtccgcagctttaaggggctgcgtggacaccatctccttcaaccggctgttttctctatacagacagtcgcatttgtgcatgagatcctttatcagtaattccttatcggttggcataatcgtttaaatatgatgctaagatactaaaaaacagccggaatacggcattgtatatgttataatttgttacaactacaacccatggaaaccactccttttataacgcctgaccttgctgccgtccattccttgaaccatcatcacaaggtcattccagaaggtttcaatcgctttaatccgaccttcctccgtatttatgaccggcagatggaagtgcccatgttccagcctcatatggtatatcaccagaccaccatattccatatggaggattttcatacaggtacaattcgcattgataaaaatgaaagcgtcaccgtcccgtacattctttcccatctggttggtcacgatgccgctaagcgtataaaaactcttacgcatgtctgtcggatacgggtaaagataatatctgttggattcattcaaagaaaacataggctaacggtttgaattcaaaaatatcagggtttgcaatacctccggtgacaaagggctgttcaagcggactgtgacgccattgggataggagatctcacatagcggctggggaattggcgacgggctgaccggaggggcagacagcagggatttctccttatggggaagactgacctggcccttactgtttacctttaccgggataaagccgcctttgcgcaacagcttggaacgccactcgtagaaacgtttgggacgaatacattcattcgaacaaaaatccataactgacagtccgctcgacttgaaacgggaataaatagattcaaaatcttccatggtccattgatgtgacataacaattgagcttttttactttgattacaaaagtaatatcacatttttagaatgaaagggggagtttatcgaatgcttaccctctttccgcatcctgaagcgtatccgcgatccagttcctgcaataggtggcggcttcctctctgcaaccttctcccttgagaaaccggcgtgaatactgcccgctggaaaaataaacgttttcaatccggcagaccacatggaaacagtcatcgtcttcattcccgtcttcgttctttctcgacagggagagatatacattctccgcatacggctccagttccatataaggagccacgacggtattcccgtcagacttgtacttgaacacttttgctttcatattatcgttcagtttgtcggttgttgaatatttcatctataatctctttcccgcttctttcacccttcaggaaggcaaggaagcgcctcaaaaagagccgggcacagtcagtgcccagttgggagctttcaccgtctttggttgcgcataccgcaaaacgccccagtccgaaactgtcctgttgcggtatgatgtggtaagacaagtcctcgcttgcgttgatgtgcaacccacgacggaaaacatagaaagttttcgggattcttctgtcggtatcgatttccatacgcttgtaaccgtggtgttccaataaccggaccagttccctgtttgtcggaattgtatgtccgatccagtccggccagcttatattttctattatgtgtccgtaattgtcatataatatgttgaactgttcctggtattcatcgtaaaattccccgttcccgttgcacatttcctccaacgcgatgccgtttttacggacaagggcaaggtcgcccagtccacacgcgatttcattgagcagcgtgcgttcctcatccctgtcttttgccgttccgtaaattctaagcagggaataccggtgtagcgccgaacgggatggcatatccagtttttcccatatcccatcgtctcctatagcctgtctggtgttttccggaagtccgtaccaccacttgtccaaattgtttgtatccataattcctgaatcagattgttttcaaattctgttttgagtaccatgcctgatacgcggcggcatactcctgacgttcccgttccagggaatctctcatctcaggggtgtacccgagcaggcggatgtatcctccgttatagccggtgagttcgcaccttattccggcttcctccagtttgtcgatgcgttttttggccatttttgcgcttgaatattccttcggccaaaaatagagttcgccccgtgagccgaaacagtcttcccccagaattatttccccggcatacttccggctttcgatgaagccgaaacgcgctttgcccaatgcccggcgcattgccttgtgtgccggaccttccggatgcttgaatacctccggcttgtctttgctgccgagtctgggcggttccaccttgtacggctgtttgtaacttccgattccgagcgtcaggtaaaagttggtatggaaatagtccgtcatggggtcgctgtcatcgaaattgtacgacatgatgaaatcgcagatattcatcattacttcttttgccctgtccgtcaaggatttgtctgaatggatatgatggtgattgacatcgccttgaacttttccggactctttggtgaacgcctcgaaatccgctttcatcaaccggatatggatggagtggcaattctcccgtctgacggagaacttgtatcccggataggtctccttgagccatgcccgtaccagttccacgatttccggcgcgtgctgtcccttgtaattgcggcctttccagcggtattcgttatacacgtactcggtgtattcctttgccgtggctcccggatagtcatgttcatatccggttgaagccgctgaaacatccggtttgtctttccatatcccgtacagtttttcaaactcggtgttcacccgttgcatgattgcagtgtcaccacccttgtccggatggtgctgcaatgccaggcagcggtattccttcttcagatccgccatgctgtgtatgttctgaaaataagccatagccataagtctttatgcccctgcgaggcggttgataaaatattcctgataatcaaggtcaagcccgaggttgctgcacgccatcccgatgtcgtctcccctcaagtcatccgcttcctgcaattcacgcaggtatctgatttcggaatccaggtattcctgcgcttccgtctgactgcaaccgcatgagttacttatcagttcaatgatgtttgtctgcatatcattcgttgtttgaggtatgtttattatagatttcccgtttatattcgtagtcccggctgttccaccaccggcctgccgcatcgacaaatgtctgcggactttcggcaggcggacagtcacagactttcaaccctgtgatttgttcttttgactcaagaccacatgactcccaccaggactgcatcttttgtgtgaattccgctttggtacagaaaaaggtctggtcaacgcattcttcacaccatttgccgtcacaccagtgcccgtcattgtcatcatacacatagctgatacgttcatccgtgttggcgtttatccatacttgaatttccaactgccgtgagccgcattctttgcatacaaggatgtcggaatcgtccggttcttttcggaaagccctgccgtcataaagcgtaacggcacgttcaacaagtaacttctgatagttctccgacaatccggcaaagaaccgttccgcggcaccgaaaatggcattgtctgccgacacggaccatttatcccaaaagtgccggtacatatctccaaatactaccttgcattcttccttgctccaggcgttccacatgtagtagaagaaactggagactgcattttccgcctgatatttcatggttcttccgttttgggttcaacatcttttgtctcttccaattgccgccatgcagcatcgtacatttcatggagccagtctatattccttgcgccgagttcaaacgggccgtagcattccacctcatcaccgctttctttctcttcggcaatgacggtcaggctgccctccattatccggacacccgttacccggcattcatacgggtctccgtttttcccgaaccagattatccataccgggtcatcttcccggttcgtaaaggcaagttccgccagtgagtgcgcctgaagcaactgccgtatcgcttcaatgatgccattacgtagttcctcaatccggtcgctgaaattcatcgcgatgtattttgcccgggctttcctgcccgtttccttgatcgagagtatctgcgattcgggatggatgccgaagttccagtccgttacctcgtcatcatcgcgtgtcgtgtggatattgccgcccagtaccagaccgcagtcttcctctaccattctttttgcttcttcgcggttccctgccgctaccatgtaagtgccctcgaaggcgtatcttacccttacttcatattttgccatactcctataattgggttgttgattgttgatgttacatgattgattgttgtcctgattcctcgaagtatgccggtgatatccggtacagttcgggaaggttcagttttaccatcgggtattccacccatccgctcctgcgcctgtaacccgtatcttcggcaagattgtatcttatgagaaagtccatcgcttccggattgttgttgatgtcaacaaatgccttgtcgggaatcccgaaggccggaaagtcctccagattgacggtcagtaccgtataagcttccccggtcttcggtacttccaggctcaaggcaagccagccattcggataaaacccagggacaagtttcaattttcttttatggtatggatatgtcttgccatgccggttctgaccggaatccatgatttcgaaatcttcttcgccttcagtaaatgaccgcatcgggcaggatacatcataatagcagccgtcttcgtgacagcacaggtattcctttccttcggagaggatgatgacatatttcttttccatgactttatgattttaatggtggatacttgattttatgaggcgacaaggcttatcctctcaccgaaaaaggagtcatccaccccgtacacatgccggatggagcattcatacttggaacgttcgtcatccagccggaaacggaaaccgtgatagtctttcacttccaatttcagccttacgtctttcttcagttccatttcaagcaggcttccgccgccatatgttgaactgaaaagtccgcaacagttgcctttggggataacgacctcttccaatgaaaagccggcttcatacagttctttcaggttcaccctgcctatataggtcagcaggtttgccccgcagcaggaattgataagctcctcatagaactgttcgtatgagacctgctccctgccgttccggtttttacggttcgggaaacgcccgtaggccttgtagccgtgctttgtcaggattttctttactctcgccggattgaggttcaggctgtccaccatgtccccgaaataggactcctcgtacctgtaaccgccctgcgattcaaaccagtgggagttgatgcagtcatagttggaaagcatctccacccggatggggatgtcgtccgtatgcattatcagctcctttatcacatccgaatcatttcggctgtaaatctcgtcacggatttcatcttcgtgctcatcgaagaagtcatccacatcctcttcgtcaaagtcattaaagacggtacattcctctttcagtttcgcgatgattccacggacagcctcccattcggcatcgctgtaccacacgtctgcctcttcccacaaatgctcacggctcttgctgtcaaggcatttttgaatcaggccgcggtggttgtcaagattgtcatcatagtccgtccataccagcgtataggccggttccatcagggatttgatgaaatccaatgtcaatgttttctgttcatccatttctgttacctgtgtacggcagggttccttttcccgtacataccgttataaatgacagaagcggccttcaagccgcctccgtgtgtttcctaaccatatagttccttcacgatcttgtcgtatatttcctttgccatttccgtattccggttgaagtggaaataagccgtgtatctgtatcctgttcttggcactcctccgcactgctgtatcgccctgtctatctcccagtcgatatcacctatgccgagggatatgcttgtgccatgcagcatacatcgggcaagtttcagcgcggaatccttcctgtcgtccttgcggagcctgtcgaaagccatcagcgcgatttccctgttgcttatcgttatggtgtccatatcctgttcagtttagtgtcagactgtctttattccgttccctgttgcggcttgccagtatcccgaaatggatgctgaatatgcgccggctgaagcagacaggggaattgtattccatacgttgccacagcgtgaagtggttgccggagaacgaccacctgaaatatcctgacagcgagccgaattgcggattggtattcctgtttatcaggaacctgttcacatccacgatgtgccttgccgtcaggagaatgttcaggatctccacgaacgccatttgcgagtaggggtcaaccggcattaccggtcctttgaagttgatttccatcctgtatatgttttaatcgtaattgtcatcgaatacctcgaagtggggaatgcccgtgtcgaagtaattgcttgatatgcccgggtagtacggcaggctgtcatccccgctgtccgggcatggctcatcaccggtataggccgtgttcccgaaaagttcgatgtaatgcgccaccagcaggtgtgcatcttccgtgcttatgtcatgcccgtagcggtcacaccagtcgaagaaacaatccttgtcgggttcttccagctgttccatcgcttcccgtatctcaaaaaagttggggcacagccattccatgttgatgagtgagtccggaatgtcctcccatttcatgtacctgtattccggtgtctcctcttcggcgaacagttcggaacaggtgcacaggaattcccccatgtcgccgaagtcagacatctgcaaccagttgtccttctcctgccttgtgtctatgagatgctgcgtggtcactgccacttccgcttgattcaagtccataattcttcatttatcagttaatgattggaaccggggatttcattccacaggctccaaaaggtccgcaccccggcagcgcagggtttttcggggaaataccggagcccccggcgaggatgatttccccgaaaaccgcctgcggcctgaccttgccctgccggtaagggggtgggctacctttgcctgtggaatggaatctgcggtttcccattagttttcccttttttcaattcattatgcgctggcttccccagctgatgtgtatcctgccttcgctgtcgcactcccttaccagcaggctctcgatgacggacatggtgacgtcgaactcctcgaagatctcggactgttccttgacctcacccgtcttgatgaactcgttcagccgttccttcgtaagtaccagcgccattaggttctgctccacggaatccttataggtgacataatgcacgtccttctgctctttggagtcaagacggataaatcggaaatagaactgttccatcttcgggatgttccattgcagggattccagtatcacgtcgttgcaggtgggtatgttcaccgaactgctcaggctctgctgcgtgcagaccagtatgccgttgacggtggaatcgaactccgtcacaacgctttgtcgtttcttgaacgccacgtctcccttgaccacgaatacaggacgctccgggaaacattcgcggagacgcttctcgtaaaggtcgaatgcggctatggacgtgcaaccgacagccaccttgccgggtatcttccgcaccagcctttcgatatactttgtcttgttcggaattccgtcgccggaatagccctctatcaggtgggggacggaacaggccttgatgagcagcttgatctggcgcataagccggagaccggcatccttcttcgtgtcacccgtgctgttgtaatacagctcgcagatgcggcagaactcctcgatgatgacacggtaaacctcacgctcgccgtcggacgggctgacggtatgtgtccgtatcctgtatttctcgcccgcgaaatccctgaacttgcgggtgatgacggtcttgccgataagctctgccagttcctccttgttatagacatcctggttctgtttctcaatgccgaagacggtggattttcccggacaatggcaggcacggaaaagcacatgccccctgaaagccgagaacggttcgccgtaatggggatttgtgtcttcctctatctccttgtccttgttatcgtggtacacccggccgctccaacaaatcatattgacggagttgttatagagcagttcgaactggctgtacagttccgcgatattgttgcgggtggtcgtgccggtgtcgagtatcttgtacctgagacggcggaagaggcagaggatatgccttgtccgctgtgacgacgggttggttatctcgtccgactcgtcgaaaacgaggcacagttttcttgaggtgcgcttgacaaaccttgccagcccccgtttcagcttgctgagcatggaggtggagaggatgaggaacacgccttccggcaccgtttccaggtcggcattgcaccttgccacacggaactgttccctgttcattgagaggaagggtatccatgtcatgttggtggcgatggcgggagccagtatgacggcattccgtaccttgcggtatttgagcaggtacttagcgcggtggtacacggcggccgtcttgcccgagccttgctgccagttcagcagcgcatagcgtttctgcaggacaaggttaaggtcgtgtttctggagcgtggtgaactcacatacgtcaccgtccttgttgatgaaggtcgtgcggtcaaggtattctttcagcctgtcatcttcctccatctccgggaactgccggtcctgcatttcatactctctccgcttgcgccgtatcagtttctccgccgcacggatttggcgcatgttcttttctgtcggcacttccggcatgggcagttcggcacgctccagcacgaggtcgttgatacttgccgccttgtgcggaactttgtccaacagacgcggcgcatattgtttcagtttgaatccgtatgaggtcttcaccaacgccacttccttgcgaggtacagtattttgcgaggtgatgtacctgcggatgacagcaagcactttcttcggggtcagcttgttcttctcccattggttcacctgttcccgtgtggcgttcccgggcggtttctggttgcggaatttcgtgaccaaagcctccgtcttgccgatatacctgttcaacttggcgtgtaccttcaactcgtacatgtacttggcaagtctgtactcgaacagttcaagctcttccttgtcgatcctgttggtctcgcgcatcaggtcgaaacgcaaccggtgtttcatagcccttgccccgccgatgcgttttttcaattcttccaccgttatgaattcctccgcgctgtaagcccgcatcccgatgtggaccgatttacggagaaataccataatcttcgtattgaaatcatggactccggttgcagcaaaggctgacggggccagcttcgtctgaccgacaaaggagaaattactgtttatgccggctatccgtgtcttttcccagaatccgctctgcatgaaagagccaggcacgattatcatcaggattcctgccggattaagcacatcataagccttgtccatatagtattcctgcgacagtttgtagtcgaacttcaggttgaaaggaggattgccgatgacaatatcgaagcgttgttccggatagtattgccggaggtcgcatttctcgatatgcgcgtcaggatagaggtatcgtgccacggaaacggccttgccgtctatgtcgaagccgtaggcgttatgcaggttgggcaggtggttgaagaaattgcccatgccgcagcacatgtcaagtatcatttccgaggaggtgggagaaagcatatccgccatgtcccggcatacttcatgcggggtgaagaactgtcccatctcggattccttcttcgcttcggcgtactcgtggtaattggcaaaatcggactgcttgaggttgtgcagtcctccgatgccggtgtagcagttgtagatgctctccgccggaatgaggtccttgccggagtctatggcgaaaagtatcttttcgttgacctcggcacgcataccttgcgggatctgttgggggatgatggcatacatggctttatctgtttatcgttgaaaatgaaaacaccccgcaaggatcggcttacggggtgttgtgggattcttctcatggtcagttctctctttgagtgatttcatccagccggagacgtttgaagcagttcccagctgccgcgctgtccttgaaccggacatcgatgcgtccgttcttgtagaaccggatctgctcggcattggtggtcgtgaggtcgtaccagtcagtgacggaaacatcgttgtcatcgaaacggatgatcatctttgaattcccgttcagtatgtcgtccgcaccgtaggcgatgccggcgcacagggtttccaaatccccgccatagttgtaactgattttgcacctgttgttgtattgtatgtaataatcgtcgaaacggatgatttcgggaaatacaatcctgtccttcttcagctccgtcttgactttactccagcaggaaggtttgacgactctggcaaccctggcaagaagttcctccaccgccgtttcccggaaactcttgccacccaggtgttcgataaccacatctacatatgtcccatagacaggacgggagcccatctgaagggtcttttcgtctattttatattcagggaccgacacgttgtaagtcctgttgaaataagaaatgatgcggcccgcaaagttcgcgttggcgttgcggttcttatccaccaggtcattgatcaggtcgaacggcttgaactcgttgtgagaatagtcgtccctgttgttatggtaagtatagaaatcccgcatggacaccttgccgttctcctcgtaatggaacttgcgctcggcttgatactgttctgcctcctccttgaagacggcgtaccaacggtcaatctggtcgagtgtcttgtaaagcagttcttgctgcatctggcaatagagccggtcttgttccgtaatcttgtcctcgtttctcacttgtacgctcaggataccggaaagcaggtcgggagcgttaccggccttggtcactgtcgtttgcatatctgttggattttaagtgttagaaattatctggtttgattcggtagaagtacgtgatgtgcttttccatgtccttgactatcttgacctgttcggggtggaagttgagcctccgttcttcggcaggggcatcaaccgttttccactcggcggaaggtagaaacacatattcccgacggaaacaccataacacgatttgattttcccaatttcccttgaacaccgttccttcgtagtccttcaggaactgccagaactcggcttcatcccggaaagcgatgtcaaagccttgatagaggttgccgctttccgattcatcccttttgttcaggtaaaacttccggtaggtctctgtcgtgaaatctccatacctggaattgggttcggcatagaaccataaaggcactttagcaatgaacgtcaccgaaccgttggcgcatgcaccgcagtgtccccagtccttgaacgctccttccgtccatttcaggaatttcatgtccttcggatttacggagtggaacgctccgccgctgacactcagacggatgctcccgccttcttcccacacgaaaggaacatagggctgttcgcatatggataggtatccttcctttgtacttttgccatcaataagagcgttcccgtaataatccccatgttcggttacatataccagcctgtcgccgatttgcggtgtgacttcagagcgtgtccgctcgataagctgcacatgattgttggccatatccacatctttctgtgtcagtccatgttcatggtcgtatgaaacattccgttctttgagtgtctcgataccgtacttttcctttgttgcctgttgtagcatgacaattatatttttttgttagtccggcttttcggggccggagttcccgtaactacaggctatgaaaggccgtgtcccgtacatgcaaggttggcgggaaaaataccgcaagccctccgggcgaggatgatttttccacgacacccggagggcttgaccttgcttgtacgagcaggacacggggtacctttgcctgtgagttaggggaactcggcttcggtatgactgtcatgtccgatacaggttatttcattggttcatcatgaatttgtacccggaaaactccggtattctcagaaaaaatgctatctttgcatcgaaacaaagagttatttgaaagcatgaggaatatagtgattctgaacagtccggcattttcttatccgttgcccgttctcatgcgagttgaatgtaattcgttgatagtcaaataaaatacttcatactatcacaaatatatgtataaattggttaaatatcaatgcccaattccaaataggttggtaccatttcttttcgatttcgttaatggccagatagacagattttttcaacgcatcatcatttggaaatgatagcttatttttggtgtactttctaattttcccattcagattttcaataagattagtggtatagataatctttctaatctcgacggggaaatcaaagaacacggtcagttcttcccaattatttctccatgaacgtatcgcatatggatatttagcaccccatttttgctcaaagttatccaactccatctcagctgcttctttagtaggtgcattatagatgttctttaaatcggcagtgaattcctttttttctttccagacgacatagcgacaagagtttctaatttggtgtaccacacatatttgagtagtaaaggcaggaaatacactcttgatggtttccgtaaatccattcaggttatcagtaactgtaatcagaatgtcttctacaccacgagctttgagatccgttaaaacgcccatccagaaagcggcactctcatttttgccaatccacatacccaatacttctttcaagccttccttattcagacctacacataggtaaacagtcttgttgatcactttgccgttttctctgactttgaatacgatgccatccatccagacaatcatatataaactgtccaaaggacgattttgccactctgttgcagcctggctaactttattggtgataatggagatagcggaggtagagaggttaataccgtatatttcctgcatttccgactcaatatcagcgacgctcatacctttggcataaagagagatgacaagacgctcgatagataagccgcgggattgatgcttgggaacaacaataggctcaaattcaccttcccgatcacgaggaacctgaataacagattcacccatctcggtttgaatctgcttcctataactaccattgcgggagttgccactatgatctccttgattggagtgtttctcataacctaaatggttatccatctctgcttccagcatttgttcataaacacgagtatgaagctctttcatgaaagcagtcacatcttcgcctgtcttaaactgggacagaaactctttacttaaaaattctttaggaatgtccataaaatctgatttttacaaagttaatacataaataaaaaaactacgagaaaaatcccgtagttttctatttacacaatcagatggacagtcccctttaatctgtactcgaagcgggacttgaacccgcacagccgcaatggccaaaggattttaagtccttcttgcattccacctttcgagcatcctaaagcccttgcatatatttaaatatcaagcacttgcaagacactttgctatcaacactaaatcttagaaatcatttggtttaactattggtttaactccgaaccttattccaagataaattcaacatttcattattaatctctttgcagcattaaactgcattgcaaatatagtcaatattactttgttacacaataataatctgttataattcaaatagttgaatcaattatttgtgtagatagtgatactgtatatttcgcaataaacagttattcatcatgctgtataaatccaatctttctgcgtggcttctcttccaatttctttttggtttgcagctccgccaatgtttgattgataagttccaactgcatccgtgtatcatcattaatgtcattgtaatcggcaaaaacttcttctatgtaatctttcagttctttcacttcgttttgtaactccgcaaatttatcactcttgggtaatgctaccatttggcgaactgcaacaaaagcacgcatgattcccatgttaatttgaattgcggtcttagagttcagtacgctacttaacatagctactcctaattcagtaaacgcatacgggttacgtctaactcccatctttatagaattggaagtcacaaactgtgacctccaattttgtgtctcttcattggtgagttgaaacataaaatcttcgggaaaacggtctatattacgcttcactgcttgattcaacgctttggtctgtacttcgtacatttctgccaaatcacggtcaagcattactttctgccctctgatttcatatattttgctctgaataacttgtatctgttccataaattaaattctttgaactgcaaagatagctaactctatataatatggcgtagaatgtaatgaccaaatttgaacagggactacaaaagtatttcttaccaaaaaaggtcgccattatatttttatcatttttcatttggacttttctatagttgtgtatatagtcgtatatcagaaatttctataattggtgggaatatctggattcacaaaagaaccttcactcataagaggttaatagatctgtttagaactgaaaaaagccaacttatccttaattgggtaggttggctttttgcgttaattacagttccagaggactattcccattttaatgtataaatggttgtgtctgtttctgttttattgtctgataaacttttctcaatatttatcacagtacagttttctacatatccatctttatccatcttataggtgtatttgatagtcatttcataggcatcgtctttgttgtaaatttggtctggaagttgagtcgtacgcatacccactaattctggatgagcatagaaaatgcaatcatcatctataggctcccatgcttcatcttctatattgggaaaccagcctttacaagtctttccactatatgtatattcatagacagcagtctcttctttagaatcgtttatataagtattagtaagctttgtcattcttttattttcccaagtatagatataagtatcagttccattattttgggaattagtttctttgacctttgctaactgactggatgaatcataagtgaatgatttgttatatccgtcgttatcttgttgtgttcttactaaatggtcagtgagtgtatatgttctggaattattaagtttggttgctataacggtattgttgcctcaagtgaaatcaattatgtccctatctgtattactatcatatttctctgtacgagtgacagaaactaatcttcctttagtatcataagaatattcccaaagagtagtttcaccatcatcactagtcgattttatttccacaagttttttctgattagtaataactccatcatcatctttaatgacttcatcatcatcactactgcatgctgtaaagtttgcacacattactatggctaataaagccattcctaataatctaaatgttctcatttctgtttaaattttaaattgttaattaactatttcagtctatttaaactgactttctattttttgtacgtttatatcgctttgtgattttgccttctagaaaagcaagaagagaacctattgtaatccaaggtataaatagacccaaaagagcgatagagataatcagtcctattctatctccccaaccagcacgattaaattcatcagaagatatgtagcaaaatattaagataataggagtaagatatgttagaatccacataatgcacccaagtgtttgataaagtgtacttttactaagtgcattgtctatttcgttttgctgttcctgctcaattttatgttgttttgctttttgttgttctatttcttgttgttctaacaatattctcttttcttgttgttttgcttcaattcttttacgttctgcttcctcaaaataactattaagttcatttagtgatttgagataaaataattgtttttgttcttcatttatcataaaaagaaatctttcagtaccgtcttgttgtaaggcaaatatgatattgtcaataaatgaggggtgaagcatataggattgctccttaaaagaaatcacaagggatttattggcggcaatatactgccatgtagcattaataacattgccattcacggatgcaatgagagagccattttcttgaaagatgtataattccttatctccagaatcattaaatatccaccaagacttgttgcatagaacagtcttaacatccagattttcactaaatctattgtatctgctgagaatatccagtaagtaggtcttcattttgctaaatctatgcttcctaattcccagacaaaagcggtaaaaataaaaaagcgtgggaactattgctattactgcattgaggctctcgactgcccttcttcaagtaataaacaatagcccacgccaaacgatatatagactatccttataagataggtatataacattgacgtgagcgttcttgcctattatctttgaagaatgaaattgtcgagatttcaatgcaagataatatgttaaacgctctttgttactaatatgtccttctaactccctaactcaataggtcattagaattgatgcaaagttacgaattacgttctgattagcaagaactattgtttattaaaaggaggtgtcttgttcgttttggaacaagtattctgctttatatgctctctaacataatgtttggcatagtatatctggctatttatgctcgaaatagataaaatgtgttcataaagtgaataacttcaatgcggtataaaaattagaagtgggtatataagagtagaaatcctcaaaaatctaccgtacataagttacagtcatagtagcttcatttcctttctaattatctgttagttatagctatggttcattagtaagtctgttattgtttcctttcaatagtagattatgtattggcgaccttttttgaacagggactataaaagaatttcctctcaaaaaaagtcgccgctatataatctattagcaatatagcttcattttcatcggatatttttcttacgctctcaccaacaatgaattagctgtattattgcatcctcttttgcttgtaagcatagtgcagtctatttatataagaccattctatgttagtttttcttacattgctgtttttgagaattgctgtatcttttgaaatgggacaaaaccttctatttctgtaaatggtatagcacaacagaaaaatcatattttgtcccactctgactaataatttagaaacttaggcagtcataagtatttagtagttcttcctgtctcaatcctaagtatctcttagtaatagaaacacttgaatgattgaataactccatcagcttgactaaggcaagttcagaattatcactattcatattataaacctgtctgccaaaggtctttctaagtgaatggcagctaaagttcttcactttgagtttatatgtcttcttcacctctttaagtataatgtttattctctggatggtgaaaacagttcctttctgactaacaaggattggcgcattaattccaatgggatttatttgttcatagcaatctttaatatgttgctgtaactgcgagtttaaacggatagttctctgctttcctgttttaatttcaatgatggtaaattcttcggaattgagaatctgcttccatcgtaaagccaaaatatcagagattcgcaatcctgtgaagctacctaatgcaataaggagcgatattttgtaattctcatctttagttaatcttctaacaaggttcattgcatcagaccagactaaataatccgctgtggttgttgaatatttaagtgacataatgttctgttttatatgtaaatgaataaaagtgaatgtttatttagactgtcaataattaaagtattgataatcagataaacattcactaattaacaaagtgaatattataaaggcatccaatcgtaaaactgaatgtccttataatatatagtagattctaaaacggtctttctccgtattcgtatgcaatgattgagttgataaccctatcatagaatgagaatccgcaacaagtatggaagtatgattcatatattgccgcatattctccctgttgtctgcttactctgtctaagagtgaatcaaacttatgtagccaatgttttaatgcttgcaatcgtttgatatattgcaagttattttctgcgcaacagaatctctcctgtaatgcagtgatatgatttactgtattctcaatgtctttgatattcataatctttaaatagttagttattagatataaaaaaaaggacacctaactaagtagatgccctttcaatagtatgtaagagttattttatttcttggaataatggtatctcattgagagtatatcaatttctaccctgtcatcatttacagagtaaacaatcctatgttcttcattgatgcgtcttgaccatttacccgataaatcatattttagaggttctggttttcctaatcctgtgtagggatgttcagcgatatcattcagtaaagctgcgactttattcagaatagctttattcccactttgcgagaaatagagatattcctttcgtgcttgttctgacaatgttattttgtacatgacactctatttaagaaatcatctatgctctctccttcattctgcgatatccctttaccgttctttatatcttcttccccttgacgtatggcagccattgtttcgggtgaggacatgatatattcagtttcctttatcgaattatattcatccaaagaaatcatcactactcccttcccattcccacgattaataattacagtgtcacagtcatcaactactgcgtcaatgtaccctttaaggttcgctcttaaatccgtataattagctgttctcataattcctccttttttatagttacacaaagatatgtacttatgtgcgtacttgcaagtttaattagttaatataaagaaaggacacctgtgatagatgccctttctcctctcaatcaataatccatttaatcaatgaaccatttatatttctcgtcaccatgcaaggcagagtttattccaactgccatttcagtagcgtttaaacttcgatctaagaagctgtctatatagctgctcttatttgcacctgtaagtaagttgtagaacttccacatattcaattcgttaccaaaactgctaaaattctcatcattaatgtatgctttagccacgctgttaatctgcgtatcagtaatcaacattcttggtaagctcttttgatagccacttggcagacattgataaagtctcatcttacctaatatttggcagaattgatgttcactcattgaagtgttgcctaattgctgcattagatgtagatgtttggcaggattgtagttgttgaacagttccaaagcagaacggtaaagttcacttgtattgctcactcttaaatcctctttgtaaccatcagtaaagatgcacatgttacagcagacttgattcttaaaaccaatagctaaacgaaatggttctgggcttttcttagaataaaggttcatctgattataggctctgacacctacgattgaaagattcagcttattgccaccaacagtttcatagatggtaggaatatcaatgctgaacgcacatcgttcgtaataaatcgttttgtctgattctaataattggttcacaggtttacgtatagcttccggtatgcgtcctttaactatatgactgcaacgtatgtctgcttgctccactctctcaccactaaagaaggaactagctgcttcttggatggcttcaataaatgcggcatgattgatggtaagttcattgtccttagaaaagactggagtaatgcactcgttttgtaagtggttcaaagtcgcttcctctgtattggcttcaatgaaatgattaactctcttaggtgctgcaatttcttctaccaatgtagcttcttctgcgtactcacctaaattaaatcttgactggttctgtacgggcataatctgtaatgtttccataatgataaattgtttttaatgattattgattgatgtatataaatgagactgccagtataaatggctctttaccagtgtatttttatatcaatctataggagggggagtaaaagggtagtgtaccatagaaacagtaactcatatattttttgacgactgactaaatggggagggggcttttataaagtgctctctattctcatatttgggatttttagctaatttgaaaattgctgttttttgtattaggtagtctttttaatggtatcagttatatgtggcatataatagagtaggtactatataattcatataggaatgataactcactataatcagaattggggaaaaagtggggtcatagccctgcaccaaaaattaaaagccaccagtaatttcttactaatggcttgacgatatattattgatgtattattagtaataaagaaaagaagctgattttcattgtaataagataaatatgaatcggtaatttcctatagtcttgcaaaagtgagaaatgaaaagcgattaggtaggcatggcgaccttttttgaacagggtctataaagaaattatttccctaaaaaagtcgccgcttatatgcctttggatttaatgagttgataacctttgacttttttcctttggctttgtaccgcatagaaaaaatcattgatagtatgggatgttatcgctttctttggttgtaccccaacaacattgaatattcgggttagttcttcctttatatgttttgcagagtaccatttctcaacttcaaatgaattagttatcagtttaagcacttctatccctgtagctttcttatgatagtcagcgagaatcatcgcttcttttatttttatgcggttatattttaaacggtctatctcaccttttccgattttatcgtatgcctgcacaataaaactgtcagtctgttccaagtctcttttgaattgccattccatttcagtttgacaatctccgagcagttcaagttgttcaaccattattttgcgcttctccttaatcgaaatggatttattggtacgctgtaaccgttcatagtctccaagcttgtagtcttcaacactataatgattggcaataaacgcatcactgttcttatatatctcccaaagattattgacgcattggtaatagcctttcaccagttccgcattcacatagttatctatggcgaagtagttcactttaccgtttccatccagtaacttagtaaacggtaaggcttcaactgctgcacgataagcgtcttttgttgaaatggtggttgcataattataaagattctgtagcatatcatatatttctctggaacaggaaatgtagcctttcaactcgtctttacttcttaccatgaaattacggttggtattactgatatggtgaattgacgaaacgccatttctgaatcttcccacacactgaatgacatccgtgttcgggtcaaataccgtatattctgtaaaatagcaatccgttagtaatagtacggtgggcttttcctcaagttcaatatcaaccgcattataaaaacgggaggttagccaattataacgcttcatcatgtctttgttccaaatatcagaagcattattgaatttcaagtctttcagcttacccacacttttgtcagaacagaatactgcggattcatccagcaaaccaagttgttgcatcagcgcataaatagtatctgtcgagttacaaaagataaagcatttctctgttctgcctaacatttcttttgcgctttgtaataagttattagtagcatgaagatttatctcctttgcataatcgaatgtaggaacaatagtgatagtctgaaaattctgctcttcaaaacgggggtctgtaaattctatcggagtagcagataccaaggctttctgcctgcactcaaagaagaagtccataggcaaggctatgtcgcttctgaaatccacatctttaattattttatggcattcgtcaaacaacaggaaacagttaaagcgtatgtctatctccatttcatcaaaggcttcctgtaccttgtagaaactttcgggagtggtaagaatcttgaaatgcttcttttgcttaatgctccgctctatatatgctattatattgtcagtatagacaccctcaaaaacaccgaacaaattatcatctttatgtttcggatctttgcacttcccactgataacaggcttgttcggttcgataatgattgaattgcgttttgctttcaattctccataggtagcaccaagtcctgtcagtttcttatataatattatagtattagtaggtatcatcggtaacacttctgtcagatacggtatgtcaccgtttatattcttgctgattcttatatctctatttttcattgttctattaggattaaagaaagagggagtgtttcatccctccttcggtagttgattaaactgcttgtctgttctcacgtaagtaatccagtgtatcttccgagcgattgattctgaacattacctttcctttgaaacatgggagaattgcactgatatattgggggcgttctctgaacaaagggacatattgaatggtctttcctgccccaatcagcattttcagtacactaaactgaaagtctgtgttttcgtccaaagtgtctgtcgcgttcgggttggaatcgaagtctgccacttcaccattatataggtagttcagcaaaccaatgaacgcttcggttttcagttggtatttgaatcctgccacatgaaccgattcaatccatgcacaaggcatattgtccttgcttccgtagaactttactgtcaattgctctttgcgattcatcatcgcttgcaaggtgttgtatgcgccttgattgtcatactctctaattgcactctctgtgttcaatgaaaaattaaatgtactcatttccttctaaattttaaattagtaaattgattaagttccgcaatcatcgactttggcgccttattgtctctgattgacactgcaaagatgagagttttttagccttgttatcgggaataaatttttgctgttttctattccccttcttcaagtaatgaactcttgtcctttgacactgcaaatatagagactatccagaaggtctatagggaataaaaaatcccgcaattctattccccttgttggagaacggaattacgggattgataagatgttattatttaactatttaggtagtgaactctggataaacattatttgtattatttggatagttgtaatctttatattgtttaagatatgctttgaggtattcattttcaatatctaaccatttatcatttgtggatattcttgtgaaataaatgaggaacgaaacaagctccatttcttttaaagagtgttttgtccctgcctttcgtttgtttctaatctgtggttgcatattgaaaaaacaaagaagcatgttagcgaagaaagcaataaaaggagattcttttaatatttcagattcatcagctttgattcttcggcttaaatgtttaaggatttcaatatctgcttcgttcgcatatttttttatggcatcaacaatgaatcggatagcacgagtatcatctatttcagcttttaacttacctgctttgaagttgagtgtcatagtatcatctgccgatttgtctatcatggcaacaagctgttctatctgttcaattgggtttagcttcatagttatgccttgatagaacatgttttcacaatagtcaaaggcgaacaggagaagcagccaaaatttatcaacgtctacttccagatattgcaagaggttttgaatctctctttcttttagatatttgtcatatagatgttgtatagtgagaagccttttgttgtatctgtctttaaaaataatcatgcaatcagttgtaccgaatatcctgttgctcgcttctttgatagcttcctttgatgcttcacaaagggaaacattgattctgtactcataattatcaaaatcgggcatatagatgtcttcaataatgccaatgtatttcattaattcaaaagcattattgttccattccaatttatctatcatagcttatgtattagtttatggtacaaaagtatgaagaaaatcccactcacatattactgcaagtgggattaattatgagttagagcagattcttcatagcatcatccatctgttcattaccaaaactatccaagtaaacctgtgttatcctctctgaactatgccccaaagattcgctgattattgaggttgctattcctgctcgtttcaagactgttgcgtatgaatggcgtgcaacataactggaaattttcaattcaattcccaattcttttccaatatcatccaaatgttcgttcacattagccaacacatcatatattcgatttcttaactgtctttgggttcgttctcgattatctaatatcggaaatatgtatttatgctgcgaagagcgataacggtttaatatggctatagctttctcctgcaatggcaacattatcaacttctttgtcttttgacggacataggctaaacgttcaccttcaatattcttatctgtcagaaacgccatatcagtaaagttaatgccacccattaaataggaaaaggtaaacatatcaaccgctaacttcttataaaagcgtgcgtctgacacatcatattcaataacctgcttcacttgctctttagttatcgcacgtttgaccgtttctttatgcagtttagagactttgtatttcttgaatggatataaatcagcttttaccagtccttcagtcattgctaaattatagattgctctcaacgttctaaatcggatgccaattgtattatcctctaatttacagcacctcaaccatgattcataagatttcaaccaattcacatctatatcggaaaaatatatatccaaatgccctttgaatttgaatagtgaattacgtacctgctgaacagaaagcgcatatcccaatctcccctcatttttgagctgatttatatagtcattaaataaatcatccaccgttttaactttgcgtgtaggagttaccgtttcaattagagtagcaggagaatattctcgcttttcagcagaaaattcaaatatctgctctgaatatttttgttcctgctcattaatagctttcaatatctgctctctattcgggcaattcctcttaggcttgttcttatcaaagtcccaatatttaggatttactgatattccaagactaacatacttcttcttgccgcttttacaaacacgaagcatgattgggtgttctccattactaagagttttagacttgtagcacaagacattagctgttgcgttcattgcttttctggtttaactcttggtttaactttcggtttaacttagtagccaaaaaccaataaaatcaatgcaatttagtgtaataatgcaaggaggatatataaataaaaaagctccataaatcattgatttacagagcttttcttggtactcgaagcgggacttgaacccgcacagccgcaatggccaaaggattttaagtccttcgtgtctaccattccaccattcgagcatcctataaaggagagcggaaaacgagactcgaactcgcgaccctaaccttggcaaggttatgctctaccaactgagctatttccgcaggtcttttttgtagaacgggtgcaaagataaggagtttccccgttacagccaaattttttacatggaaaatgttacagttttattagttcctcacttgcaaagaagtgccggacacggtgactttataatgtttcagatactctgtaccttcccccgtaggaaatccgccactactcaaattatattgggtatggcatttaggacattctgccgtccccaatccatcttctaagacctctaccgaaacattacgactggcctccaccggacaagctgcatcataagcaacataagtattcccctctgagaaaacactctgcccgataatcaatcccgcatagcccaccggcagtccatttacattcttctctatcttcagaaactgaccgggagtcgtaatcttataataaggagactgtgaaagactacatgaaaaattaaaggtaacggaaggaatgctcgattcgtaagaatcaccacaactggtgacacacaaccaaagcattcctatgactatacagagtttccgcatacaatatcgtatttatcgaccaagcaaagctttttcagctacttccattccatgaaaattgaaaccatctaccacttcctgcatcagcgccgagatttcatcgttacagagattaccgatacttccctcatgtgtgtgatgcacttgcttgctgtgtgagaagtttccggcttcaatgtccaatcccactttcttataagcatcccggaaaggcataccttcacgtgccaagcggttcacttcttccacactgaaaataagcagatatttgtcatcgtcgaggatatgttcgttcacctttatttcattcatgatataggtagtcatctgcaaacagtctttcaattcttggaaagcaggcaaaaagacttccttaataatttgcaaatcccggaaatagccggacggcaaattattggcaatcatcataatctgttgtggcaatgattgcagtttattgcacttggcacgcgtcaattcaaagacatccgggttcttcttatggggcataatgctggaacctgtcgtgcaatcatcaggcagcttcacgaaaccgaagttctgactgttaaacatacaagcatcaaaagccagtttggagatagttccggcaatactcgccaaagcaaaagctacattacgttccatcttgccacgccccatctgggcataaacaacattatagtttaaagagtcaaagcccaacaaacgtgttgtcatcgtacgattcaatgggaatgaagaaccatacccggcagccgaacccaaaggattacgattacacatcttgaatgctgcctgcaaaaagaacatatcatccaccagactctcggcataagcgccaaaccacaatccgaaagaagacggcatagctatctgcaaatgagtataacccggcatcagcacatctttaaaacgctcactctggcatatcagcacatgaaacagttgttccacagcttcagcaatctccttaatctgcgcacgcgtgaaaagtttcagatcgagcaacacctgatcgttacgcgaacgaccactatgtatcttcttacctatatcacccaatttacgcgtcagcatcaattccacctgcgagtgtacatcttccactccttcttctatcacaaactcccctttctcggcagccgcatagatatttttcagttcttcaagcaaaagagccagctcttccttcgtcagcagaccaatactttcgagcatggtgatgtgagccatagaacctaccacatcatgtttagccagataaaggtccatctcgcgatcacgtcccaccgtgaagcgttctatatccttatttacttgaacggatttctcccaaagtttctgagccatttatttagtgattaacagttagtgattaataaggtattatcgacagcatatccgccatcttttccaacccttcttgcaaaggtttctgaaccatacctttcatgaaaggattcagttccaagccaatggtcaatttcagtttacattctgtttctgttaccggaacaatctgtatccacaaattgaagggcagtggtgaagtagttgtggcaaacttaatacacttgcatggttctttttctactatgctcaacgctattttacccacaggagctacttctatcatcatactctccgagtcaaagctcaaattcttaactttatcctccggcaagctgtctttaaacttctccagattattcaaatcagaaagtttctcataaacagcctcctgtgaggcaggtatagtttttacactactttcaaattttgtcatattttgattctctttaaaagacaaaaaaagaactatccggacagaaactatccgaatggcccttttatcatattaattattttatagtataaaccgccgttactttccagcatcccaatgtgcagggtccttacgccattcgttcagcgttgcaatatcatcttcttcgatgtaacccgtacgaagtgcaacatccagaaccgcttcataattcgtcagcgtcaccaaaggaactttggcatccttgaatgctttttctgcaaccgggaaaccataggtataagctgcaaccataccgattacttcacatccgtcgcgacgaatagcttctacggccttcaagctacttccacctgtagaaatcaaatcttcaaccaccacaactttcatacccgggcgaagctctccttcgatcaggttttccaatccatggtctttcggggtagaacgtacatacacaaacggcaaattcagcgcatcggcaaccaaagctccctgagggatagcgcctgttgctacgccggcaattgcatccacctgcccgaaacgttccaatatcaaacgggtaatctcaatctttacaaaattacgcaaagaaggataagaaagtgttttgcggttatcacagtaaaagggagatttccatccggaagcccatgtaaagggatttgccggttgtagtttaatcgcttttatcttcagcaacttctctgcgaatagtttttctaaagttctcataactaaattagctatttatagtaaatatggcacaaaaatacagaaacagaacgagaataaaaaaaagaataaagagatttttcactcaaagtcgtcattttcgtcagaaagttgtatacaatgacgaatatctttcatttcaaaaccccgactcagggcaaaacgcatcaattttccattcagttcatactcattctccgcatgtatacttttcctttttgcagtcagcaaactatctaaaatagacaagtattcttcttcatctatttcattcaaaaactgccggcatgtattataagaaattttcttcagttgcagtgcttgggcaattttcactttcccccatttggcaaagcgatatttatcattcacaaaggcacgacagaagcgctcttcatcaatatatttttcatctaccagccgcttgagaatgcggtcaatgacatcatagggcaatccccaacgctgtagtttttcagaaatctcagcacggcaatgttccgctgtagagcaataggcagctactttattcagcgcctctgtttcagtaatattcgtcatttttcggctattacaaatcgatcattatgagatatgtccttttggagtctgaccgcgcgatatcctgtttcacacaacatcgctacagtatcctttccaaaagcacggttaatttcaaaataaagttttccaccggacgtaagcatctcaagtcccagcacggctatgcggcgataaaaacgcaaaggatctgtatcgggcacaaacaatgccaacgaaggctcccagtccagcacattatgttccatctcctgtttctcagcttcagtaacataaggcggattgctcacaattacatcataacagtccgccacacaaggttcataagttaacacatcgcgctgttcgaaccgtacagatgcctgcaaagccttactattagcagcagcaatagataaagcttctcccgatacatcccaagcggtgacttgcgactccggtaattctttcgctaaagaaatggcgatacaaccgctacctgtcccaacgtctaaaacacgagaaacgggagaaagttctttcaacatcatctctaccagttcctcggtttccggacggggaatgagtacacccggagtcacgcgaaaagttcttcccaagaagcgagcttcccctaaaatatattgtatcggttcaaaattatgtaaacgggcaagaatgctttccaattcctgttcctcttttacagataaaattatatctttgcccagataataatccacagtttgctgccccaatatctcgcaacagataatccgggacaggtttccggcttcgcggggatcataacggccctgcaatttccggcgaatataagaggcggtaatgttcataatggatatttagcggattcttcacctgttcggcttcccggtcagaccgatctccgtccgtatcctactgcgaagaatccattttggggtgcaaaagtaagaattatcatagaaaaatggcacacatggaagaagaaaaatacatgcgccgctgtatacaattggcgcaaaacggactttgcaacgccgctcccaacccgatggtaggtgcggtaatcgtatgcgacgggaaaatcatcggtgagggctatcatgtacgttgcggaaaagcacacgctgaagtcaatgctattcgttccgtaaaagagacctcattactaaagcgttccaccatctatgtaagtctggagccctgctctcatcacgggaaaactcccccctgtgcagatttgattattgaaaaacaaatcccccgtatcgtcatcggctgccaggaccctttttccaaggttgccggacggggcatacagaagctgaaagatgccggacgagaagtaatcgtaggagtactggaagacgaatgtcgacacctaatcaaaagattcataacctttcacaccttgcaccgcccatatatcacactgaaatgggcagaatccgcagacgggtttattgacttatgccggaccgagggtaatcctgtgattctatccactcccttaacctccatgctggtacataaaaagagagcggaacattctgccattcttgtaggcacacgtactgctaaactggataatccatctttaaatgtacgcaactggtatgggcgctctcccatacgtctcgtcatcgaccggaaacagagtctgtctcctacccttcatttgtttgacggaagtgtactgacactcgtctttaccgaacactttcatgacgctctgcccaacgtggaatatctcccgatagatttccaacaggacatattgcctcagatcatgcagatattgtatgagcgtggtattcaatctctgttggtggagggcggaagcaccttactacaatctttcatcgatgcggggctttgggatgaagcatatgttgaagaaagccccagatcactgatatccggtgttaaagctcctgaaatgaacgataaaattagttatgccagtgagcaatctttcggcagaagtatacggcattatacagcaacgaaatagtccgaattacctcattttgatgcttttttatcgagaaaaacaggggtattatctataattttatataaaacttccccgggatgctgattatagaaaaaaatgttcctatttttgcaacttgtaaataaacactatctttagaaaatgagaataaagtttttatccgtaatactgagttttcttcttatgtcaattgccataagttcgtgtcttgactcagatgaaaattatgaatatagttccgacgcgacgatacgtgcctttggtattgatactataacaaaaggcgtatattataagtttacgattgaccagttgaaaagagaaatttataatgtagactcgcttcctatgggtgctgattccatcataaaacgtatcttaatcgacacactgacggtaacaggatgggtaacttctggtctgaatgatactgtattcaacatgaacgactcagttgacctgagagaaccgatcaaactaaaagtacatgcagccgacggaatcactacccgcgaatataccattaaggtaaatgttcataaacaggatccggactcactgatttggagagaaatgccttcacttcccgcttctccggcttccggtaagcaaaaaactgtcgttttgaatgaaaatttacttgtctacacctctacaacaacagcatatcgcacttccatatcaaatccagcaagcatacagtggggaaacctgattacaatcagcggtcttccttcagatgccgaattgacctctatcattaatttcgataaccaattatacaccactgtagggggaaaagcattctactccgataatggtataaattggaaagaaatggatacgcagggaatgtacatggtaacattcttagcaggtattcctgcaaatgatgtaacagggagcaaaagtacgcttaccggcatcttcgcaaaagacggaaagaaatttttctgtgcaaaaagtattgaagaaacaacttggagaagaggtgaagaagaagtttccactgatttcccattaagagaaatatattctactgtatccacgaataaaagtggcatcaagcaaacggttttggtaggtaatacagacgcaaccattgaagctacgcaaacttggtttgctaaagatgaattaaattgggttaatttgagtggagaaatactctgtccaatcacaaaaaatccctcaattatgtattatggaaatttattctatataatggggggagaattcaataccatttattcctcttctgcagggcttgattggggtgaggctgcaactaaattccgatacccaacagaaataaaagtcacttcgggtgaaaaagaagacgacgaaaaaacaattgaatacataagtttattcaaggacaagggagattattctctggctattgatgcaaaccattatatttggattgtatggaatcaagacggctctgtttggcgtggacgtctaaacaaactgggattcaagcaacaataataaaatagtcaaatttccgtttccttatatagttaaggagtaacaagaaaacggtatgactattacaagaaatataaagatagtattttgcctgctcatgttcccattctgttgtgccatggcacaggaagaatatacttgggagatgggaggagtcattggaggaagtttttatatgggagatgcaaatagcagcaccccgtttaaagacacaggtatagcaggaggttttatagcccggtatttactgaatccacacatggcaataaaaggcaacctgacagccggcaggatttccggtgacacgagagatttcaaaaatgtgtatccgaatggagagtatgccactttcaaacggactataatcgatttgggagcacagtttgaatataactttttgggatatggtatcggtaatacgtaccggggtgaccgtcgatttacaccttatatattaggtggattgggttttacgtttgcaccaaagcctgtaaaaacggtctttacgatgaacatccccataggagtgggaataaaattcaaagcaaccccacgcatcaatataggatgcgagtttacgatgcggttcagccttagcgaccagttggatgttactcaacgggaaggtttgcaactggaagacccataccagataaaaggaaaaggttggaagaataaagacagttatgcatttaccgtctttttcgtcacctacgatctcttcccaagatgtaaggaatgtaacaactaaaaaagatgcaatataaagaacaaattgatttgagccggataccccagcatgtggcgattatcatggatggcaacggacgatgggcgaagcagcgcggacacgagcgcagctacggacatcaggtcggtgcagaaaccgtccatgtaatagccgaagaggcagccagactgggcatcagatatctgaccctatatacgttctcaaccgaaaactggaatcgcccgacagatgaagtggcagccttgatgagccttcttttcgactccatcgaagaggacacgttcatgaaaaataacatcagtttccggatcatcggagatatagaaaagttacccgcaaatgtacagacacgtttatacaattgcgtagaaaatacttctaagaatacaggtatgtgcctggtacttgcactcagctactcttcacgttgggaaatcacagaagccagccggcaaattgccgctttggtgcagaaaggagaattgacgcccgaacagatcgactgcgatttaatgtcaaagcacctgactacccacttcatgcctgaccccgacttgctgatacgcaccggtggagaaatccgtctgagtaattaccttctttggcaatgcgcgtattcggaactttatttttgtgaaacctattggcccgattttcgggaagaggaactttgcaaagccatttgcgactaccagagacgggaacgcagattcggcaaaaccagtgaacaaatcagttaaactcaaacatatttaatcaaaaacataaatgcactatcgtattttctctatactcacagcgtttatctgcctcttcggttgtgtactgacaagtgcggctcaagatgccaatggcaccgataatgatgcagcaaaaccggttattctctattcgggaacacccaagaagtatgaaattgcagaaattaaagtagaaggagttaagaactatgaggactatgtactgatcggactatccggtttgtctgtaggacaaacgattaccataccgggtgacgaagtcactcaggcttgtaagcgttactggaagcatggtctgttctccaatgttcaaatcaccgcagataagatagaaggcgataaggtctggcttacgattcatctgactcagcgtccgcgtgtatccgatatccgctatcacggcgtgaagaagtcagagcgcgaggatatagaaagccggatcggtatgattaagggcggacaggtgaccccgaatgtcattgaccgcgccaaaactttgattaagcgctactttgatgataaaggctttaagaatgcagaagttatcatctcgcagaaagacgatgtatccaacgataaccaggtgatcgtggatatcgacatcgacaaaaaggagaaggtaaaagtacacgaaatcaccatcgttggcaatgaagcgattgcaactaagaagttgaaacgcatcatgaagaagaccaacgaaaagaataaattgctcaatctgttccgtaccaagaagttcgtggaagaaaacttcgaggcagacaagcagttgatcatcgataagtacaacgaattaggctatcgcgatgctatgatcgtagaagatagcatcaaaccgtacgatgaccgcaccgtagacatcttcatgaagattgatgaaggagaaaaatattatctgcgtaatgtaacgtgggtaggtaataccttgtatccttccgaacagttgaactttatgcttcgcatgaagaaaggtgatgtatacaaccagaaattactggaagaacgtaccatgtcagacgaagatgctatcggtaacctctactataacaacggctatttgttctacagcctcgaacccgtagaagtaaatatcgtaggagactccatcgacctggaaatgcgtatttacgaaggccgtcaggctaccattaataagatcagcatcaatggtaacgaccgtttgtacgaaaacgtagtacgccgtgaactccgtacccgtccgggtgacctgttcagccgtgaagacctgatgcgttctatgcgtgaaatccagcagatgggacacttcgacccggaacaaatcaaaccggatattcagccaagaccggaagacggaactgtagatataggttacgatttggtatccaaagctaacgaccaggtggaattctctgccggttggggacaaaccggtatcatcggtaagttgagtttgaagttcactaacttctcactggccaacttgctacatccgggtgaaaactaccgtggtatcctgccgcagggtgatggccagaccttgaccgtcagcggacagaccaatgccaagtattaccaatcctatagcatttcattctatgacccgtggttcggtggtaaacgcccgaatgcattctctctgtcggccttctattccgtacagacagatatcagtagccgctactacaactcggcatatatgaatagctactacaacagtatgtatagtggtatgtatggttatggtatgtataactacggtaactacaacagctatgagaactattacgaccccgacaagtctatcaagatgttcggtgtagcagctatgttcggtaaacgtttgaaatggccggatgactacttccagtttaccgctgagttatcttaccaacgctatatcctgagcgactggcagtacttccccgttacaaacggtaagtgtaacaaccttagtatcaacctgacattatctcgtagttctattgacaatccgatctatccccgttccggttctgagttctcattgtcagtacagttaactccaccgtactcactgtttgatggaaaagactacagcaaatacagtactaccaatcaggacgacatgaacaagatgcacaaatggattgaatatcacaaatggaaattcaaatccaaggtgtacatcccgttgatggacccggtagcagttaaacgtactccggtattgatgggccgtgttgaattcggtttgctgggacactacaacaagtataagaagtctccgttcgaaacattcgatgtaggtggtgacggtatgaccggttactccagctacgcaacggaaagcattgcccttcgtggttatgaaaacagttcattgactccttacggttacgaaggttatgcttatacccgtctcggacttgagttaagatatccgctgatgctggaaacaagtaccagtatttatgcgttaggttttgtagaagccggtaatgcatggcatgatgtgaagaatttcaatccattcgaattgaaacgttccgcaggtgtcggtgttcgtatcttcctgccgatgatcggtatgatgggtattgactgggcttatggtttcgataaaatacgtggttcctcagattacggtggcagtcaattccactttatcttaggacaagaattctaattgtatcacaaaaaccaaacgttatgagaaagtctgttttattaatgatcttgctgtttgccgtaggtatgacagccagcgcacaaaagtttgccttgattgatatggagtatatcctgaagaacattccggcttacgaacgtgctaacgaacagttgaaccaggtttccaagaaatggcagagtgaagtagagaaagttgccgaggaagccaaaaccttatacaagaactatcaatcggaagccgtctttctttcagaagaacaaaagggaaagaaagaggaagcgattgtcgctaaggagaaagaagccgctgaacttcgccgcacttattttggtcctgaaggagaattattcaagaaacgtgaaagtctgatgcaacctattcaggatgaaatttataatgcggttaaagaaatatcggagcagaaaggatattcggtagttgtagaccgtgcatccgcaacaagcattatttttgcttctccgcgtattgatatcagtaatgaagtgcttgctaagttaggatattcaaattaatttcatacatttgcttcgcgaacatagccgcacctcagcattaaaaataagcaagcttattttgttttgcgttcagtttgcactatatttgcatttattcaacgactaattattaaaataaacaataaacattatgcttaaaaaaatcgcactactcgtggtactgttcgctcttcctttgggagcgatggcacaaaaatttgctcacatgaactctcaggaggttattgttgttatgccggaatatactaaggcacaagctgatctggaagctatgtcaaagaagtattctcaagaaatggaacgcactcaatcagaattcaacaagaaagtgcaagaattccaacagcaagctgactctctgccgagaaatatagcagaaagacgccagaaagaattgcaagagatggctcaaagacaagaagaattccaacaggaagcatatcaaagcatgcagaaagcacagcaagatgcattggctcccatctataaaaaattggatgatgccatccaggctgtaggcaaagcagaaggcgcaatctatatctttgatttggctcgcacaccaataccttatgtaggtgcagagagtgtagatgttacttctaaagttaaaacccaactgggaattaagtaaagacatatcttatttaaagatagaaaaaggcgtggactgcaaacagttcacgcctttttctatctttaaataagataagcggtacctcagcataacttttttcatgcaagcatgaaagttctgcattcgatttgcattatctttgcattgtgtacaaagtatttctgttatgaagcaaaaattacccactatccccggccctatcggtgtattcgactccggatatggcggactgactatcctgagcaagatacgggaagccttgccccagtacgattacatctatttgggagacaatgcacgttcaccctatggtacacgttctttcgaaatcgtgtatgagttcacattgcaagctgtcacccgattgttcgaaatgggatgccatctcgttatcctggcatgcaatacggcgtccgccaaggcattacgcagcatacaaatgaacgatcttcccgaaatggatcctgcacgtcgcgtactgggcgtcatccgtcctactgtggaatgtatcggtaatattacccatagtcgccatgtaggaattctggctactgcgggaaccataaagtcggaatcctatccactggaaatacataaactttttccggatatccaggtggagggtgaagcctgtccgttatgggtatccctcgtagaaaacaatgaggcggaaggagacggaactgattattttgtacgcaaatatatcaacgaacttctgtcaaaagatgaacaaatcgatacggtcattctcggatgcacccattatcccatattgctacctaaaatagagaagcatatgcccaagggcattaccaccgtagcacaaggggaattagtagcaactagtctaaaagattatttacagcgtcacccggaaatggatgccaaatgtacaaaaggcggaaattgcacctactacactacggaagcagaagagaagttcaccgaatcggcatctacctttctgaatgaagcggtaactgtgcagcgaatagagttataattgccaaacatttaaggataaaacaaatcttttctccgaaatacttgttatatttgtaatatataaatctattaattcttaccattatgaaatcaacagactatagccgcacagttgaagtgttcaaaggatcaccgtgggaagcagaacttgttaagggtttactcgaaaacaatggtatagcaactattatcaaagatggacttatgagcaccatcgcaccttatatagcaccggatgtaaccattctcgtcagcgaggaaacatatgaagatgccatggagataatccgtgaacgtaataaaggaaaagacgaagaataatcctttcactttcctccagaaaccacataagaacgatatacaacacatgaaacaacaattttcgagaatagctgtaaaggtaggcagcaatgtcctgacacgccgtgacggtactctggacgtaacacgcatgtccgctttggtcgatcagatagctgaactgcataagacaggagtagaagtcatacttgtgtcgtccggagccgtagcttccggacgtagcgaagtgcactcctccaagaagttggacagtgtagatcagcgccagcttttctctgccgtaggccaagccaaactaatcaaccgttattacgaactctttcgcgaacatggtattcctgttggtcaagtgctgactatgaaagagaattttgctacccgcagacactatctcaatcaaaagaactgcatgacggtgatgttagagaatggagtgattcccatcgtcaatgaaaacgatacgatttctgtaagcgaactgatgtttacggataatgatgagttgtccggcctgatagcctccatgatggacgcacaggctttgattatcctcagtaatattgacggaatttacaacggttctcctgctgatccagcttctgaagtgatccgtgaaatcggtcagggaaaagacctttcttcatacattcagacctccaagtccagcttcggccgtggcggaatgctaactaaaaccaatattgcccgtaaagtagctgatgaaggtatcacagttatcattgccaatggtaagcgggacaacatccttgtcgatttgattcaacaccctgaaagtacgctatgtacccgcttcactccttctcccgaacctgtatccagtgtaaagaaatggattgcacacagcgaggggtttgccaaaggcgagttacacatcaattactgtgctacggaattgcttttttcggataaggcagtcagcattctacctgtaggcatcatcgacgtcatcggcgaatttgaaaaggatgacattgtgcggattgtagacttcggaggtaagcccatcggtgtgggtaaggcaaactgtgattccacacaggccagggaagcaatgggaaagcatggcaagaaaccagtagtacactacgattatctctacatagagtaataaagaaaaggaaagaaggtgcattaggattactcttaatgcaccttctttttatttcatgccgcgaaattctcagtttcaagctgagataccagtactgccactataacttccaacttacagtatggaatgagtggggaggcaacgtaagcgttaccctctgttccctcacttttacacacattgtttcctcattatcagtcacatttgcaacgatggcagtgattgtaccatccggattaacgaaagcaagcatattcttatccgacggtgtttccagcctataagcgcctgtctgtacaaaatgccctaaatgcttcatcagataaaattccggattatactttacggtttgttgcttcttgtcaatggacaccatagaattctgattccatccccagggactaatgcccggagtaggaagaatcatattccaatagtgataggaattgataccattactgaaataatgcttcatcaggttccacgtatattcagcataatcccatgagtttgctccgttgccacattcagtctcagtttgcatcaggttcagattaggatattcacgatggatagttgggatagccttcttaccatcccactggaaaccaacacccttaatgtacttagctgcctgttcatcccgcaaagcagtgcgcacataatccggattggatgtattgatagttccaaaataaatatcagctttgatattctcccgctcgaaagtcggccccagataatgccccaggaagaaagtcagatcttccgtgcgccatttacaactgggaaaaacctggttggaacaaggctcattctgaacatggatacattccagcggcaatccttcggcttcataagctttaataaaacgcgcaaagtaatcggcatacgttttcagatacccctcttccatccggaaaccggtactgaattctgctatagcttcacgcggtagcaatccattcacgtctttctctccggacggacggaccgcagaagcataatgattattcgtcttcatccaaggcggaggacaccagggagaagcccaaatgcgcaagttaggatttatctgacgggcagctttaatataaggaatcagaatatacctgtcacggtcgatattgaaattcaccagattaaagtctcctgcaacatccgccgaagagtaaaaactcatggcaaagtcattagctcccatcggaagacggcaatagtcgaagcaagctccatctttgccaaagatagcttgaagaacagcttcacgatcttcagccgacaaagcattcagcgcatcccaacccatttcattgaagcagccacctatacccgtaatcaattgtaagcgttgagccgggtcaagcacaatctctgctccggtagttgtacgttccggctttaccttctgtttcacccacggagaagtctgagtggtagtataccactcgaccttttgcgctgaaacagttccacttagcaggaacagtaaaatcagacttattaacctcataagctatcttattttctttgtttcaccatctggatagttccgtcttcattgtagtaaagtttgtctacacaaatagagcgcaaccagtcatgattagataaagcactgttgtggtagaatgcaaaccactgacctttatattctacgatagaaccgtgattggtatagctgtcggtaggctccatatagatacccatagatttccagggaccgagcgggttatcactgatagcatagcgcatacggttgtcacctttcacaccgtcattccagttttcatcgtgattatcggaataagagagatagtattttccattatatttatgaatccatgtagcttcgtggaagtcttccagaccttccatttccttcatttctccatccagttccaccatattatctttcagtttaccgcctttacaaatctggccgccaccgttatagatataagcctgaccgtcatcatccacaaatacacaagggtcgatcaacgggtccattccttctatataaccctgcacagtaaaattagcagccggttctttgctggtagctacaccgatcttccaactatcattccacttcgtatcactgggatgcgggaagtagaaatagtacgtaccatccttgtaagcacagtcgggagcccacataaatccaccttctttgcgtccccagggcacttgtgacgaattcagattttcaccatgatctgtccaattcaccatatcatccgtagagaacacatgataacgatccatcaaatcgcaaccacgcggaggatctatatcatgcgaagcatatacatacaaacgtccgtccgcccatacatgtgccgaaggatcggctgtgtacatgtgcgtgataaatggattgggagccatactgtcaattcccgccgcttcttctttcgtcgaattgcttttaggcgactgacaagagaacataactcccaccaggaataatgcaaaaataggataaaaatgctttttcataagtaatgtgttttatattagtaattaatagcactgtttctgtcatttctgcaataccgaaaccactttctgtaaacgaatatcagcagaagaagcacctaccatgatcgtataatcaccggaaggacagacaaacttatctttcgcctcatcccaataacgcaacagatctttacgcaatttcaaagtcaccttcttgttttcaccactcttcaatgtgacacgctcaaaacctttcagctctttgataggcattacttcatcccgttcaggcaacttcacgtatacttgagcaacctcatcacctgcatatttacctgaattcttcagttggaaagaaacatttatctcctcttcaccatctgccacttgcaggttggaatacttgaacgtggtataacttaaaccataaccgaaaggatacagaacatcccctttgaagtatttataagtacgtcccttagttatatcataatcatcaaacggagggagttcatccagacttctgtaataggtcaacggcagacggccacccggattataatcaccaaacaagacttccgctacagctttaccaccactttcaccgggataccaagcattcacgatagccggaatatgctcatccatccagttgatagccaatgagctacctgctaccaatacaactacgatattcggatttactttgtagatttcctgcaagaactcttgttggtccgccggaagctgaatatcatatctgtcttgcccttcacgttctattgacttattaatgcccaatacggcaaccactgtctcacactcacgcaccgcctttccggcttcgccgtacaaatccagtcgcgtcacttttcctacctgtggaacacgccattgcagtttggcaatagcatagtcacggttatcataatattcagccttcaactgataaccttttccggcttccagataaatagcagcggtatcagtccggacagcatgtcccggccacgcatcaatcagcatcttaccgtcaatgctcaggcgacaaccgtcatccgatgtgaaactaagtgtatattgtccggtaaccgtaggacgcaattttccggtccaacggacagacaaaggagatttaggcaagaagggatccggcgcctggttggcaggctcaaagttgatccattcttctttacgcactttcggagttccctgcaacttggtattgtcaaaatactcggccttcaatccttccggaaaactggcaccctgtataagttccattccgtctacagcagacttccatggggcgtataccacttttacatcatcgcctaccctgtctttaataccttgcaatacagagatcggagcgattactggcaatccgctataatcaccaaactcactgctacccgcattgatgcctaccactgctatggattttaccttcctggcgttaagcggcaacattttcttttgattcttgagtaatacaatacactcacgtgcagcattcaaagccacttcctgatgttctgccgatcctatcacagcaggagatattttcgtataaggattctgttctccactatcgaacaagcctaattccatacgcgctctcaacacacgataggctgcggagtcgatgtccgcatccgtaaccatatattgacggtatgcactcagcaaaggctggtcatatacatcatctccacattccagatccaaacctgcttttatggataaagtagcggctgcttctttagtctttacatatttatgcgcattcactaacaaagaaggtccaccgcaatcggaaaccacatatcctttaaatccccagtccttacgaagtactttcgtcaataaccaggcgttcaaggtacaaggcacatcattcagcgcattgtatgctgacatgatggaagctgatttaccatccttcacgcacgcttcaaaagccggaagataatattcacgtaactgtttttctgaaatctgcggattacatacaaaacgattgtgttcttcattattggctgcaaaatgcttgggagtcgatacaatcttcagataacggtcatcatcgccttgcagacctttcacaaaagcagtacccatgataccacttaaataggggtcttctccgtaagtttccggagtacgtccccaacgtgggtcacgcgccatattcactgtgggagaccaaaaggtcagcaagtcactgaactggcttttctgctcccgtccctgatccaattcattccaacgggcacgggcctcatcagaaataaccgtagctacctgcaattgcagctccggattccaggttgccgccagtccgatagcttgcgggaaaacggtaaagcgtcccggtcgaaccactccgtgaagcgcctcgttaccgtggtaatacttaggaatatccagacgggaaattcccggagaggtggcacgcaacaggctgattttttcttcaaccgtcaagcgtgataataaatccatgatgcgctcatgcatcggtgctttctcatccttatatagctcttgagcctgtgccactccggcacaggctattagaactaataatcctataaatacaatctttttaagtgttttcatgtttttttcctattgacttataccttattgtttttctgcggatggaggcactgcatcacctgcgctaccccatgccttattgggtctgctacccatcaccaataccaatttcccaccttcttttatgtcgtcatgactaaaccaaggcttattccattcttttccgttcaatgttgcagattggatgtatttattttcatccgacgcaccttgtgcttctatttcaaatacctttccgttgctcaacatcatcttagccttagcaaacaaaggactaccgatattataagccgggaatcccggtgtaaccggatagaaacctaaagaagagaatacaacaaatgccgacataccgccaccgtcttcatctcccggtacccccatcaggtcgttacggaaccaagtcttcagcaactgacggatgcgtttctgtgtcttccaaggctgacctgcatagttatacagataaggaatatgcaaagaaggttcattggccattgagaattgtcccacatttcccgtatgatccggtatctgtgcatagaaagcatattttccacgtcccagcggttcacggaaagtctgatccagatttgctataaactgttggttaccacccatcaaatcaatcagatcggctacattgtgaggaacatcccaacgataaacccaaccattattctcaccataatattcacgagcacccatacctccggagaaacgataatcgaatggttcgatccacttaccattcttatccttcggatggaagaaagctgtttctgcattatacacgttgcgataattatgagcacattgcagatagtgagcagcatcttctttctttcccaacatatcggctatacgcgacaggcaccattggtcgtatgctgttcccagtgtaactgcaatcggctgacgcttttcgaaatgatgtacattcggatctgtttctttttccccttcctgaagtgcagggatatatccgttcttcttatagaaatcatcaatccaaccggcagcagcccccgaccacggagccagtgttttttcttcaattcctttacggcaagcttcataggccttagccaaatcgaattgtaagcctttagcagccgcatcagctactgttgctacggcatgattggaattcatacggcgggagtcacctgtaatttcagggaaggtaggcatccacatattacccatttgttcagccatacgcagataagagtcaatcacattcttttccgtaccttcgtcaatcaggagacgcaggggatgagctgcgcgataggtatcccaaatccagtcgtccgtatagaaaggttcgccattatcctcgtgcacttttccgtcaaacgcactgaaataacgaccgccctcactgatacaaacggggcgttcgaatatgcgatagagtgacgtataaagaatttgcttatctgtatcactaccaccttctacttgaatatcgctcaatgctttatcccagatttggcgtcccttttctgccaaagcctgtagattatagtccggcaattcacgttgcagattctctttagcctgttcctcgcttataaacgaaataccatagcgcagatttaccgttttcgttccgtcggcaaagtgcaaaacagcacaggcattgcgaccttcagcttccttcgtgcctgcatctattttaccatcagccaagatacccgtttctataggagcaatatccgattctatatacaagtacacacgcgtattattctccaattgctggtaaccgctcacaaatccgtcacctgctttgatggcaccgtttcgtgaattaatcatcatgtatacaggtttatcctgctgactataatctatctgataaagagccgactgatgagagggtgcatacttcactttaatttcctcgtcatcgagaatcacctcataataataaggtttcaacttttcatcatcatagctataagctacaaccggacgaagattctctccctgatacggactcaggttgaaagctgaacttccacgatggctggttacaatcaaaggaagaccattcaactgatctgttgtatagtccgcccgttcgggataaacacgaagcatactattcggcagatgaatagtcgggaaagtaggcaccagcaagtgactgatatttcccatgtaaggatttacatagtcaaccggacctttcacggcagttacttgattttgtactccactacaagcgcccaacatgaaaactaaagctacagaagccaggcaatgtgtaattttcataatataacagttttagtttatatttattcgtgaaggcaaatgtaagacctaaagctttccctttcgattaaaaaagacttaatagccgattaaaattgaataaatagctaaataagtctctttttaataattatttctgtcctcgtgtctgttttaccacctgtattgttccatccgagttataatacagcttgtctacacagaccgaacgtaggtttccctgtcctgaaatagaacagttatgatagaaagcataccattcacctttatattcagctatagatccatggcttgtatcgcaacctgtcggttccagataaatgccctgatatttccacggccccatcggagagtcacttgttgcataattcaagcggttggcaccttttccattatccgagtgattgtcagcatacgacatatagtaaacaccgtctttcttatgcacccaggtagcttcatgaaaatctttcagtccttccatgtctctcaaaggttcagctatttccatcatattatctttcagtttggctgccgcacaacgaccgccaccgccataatagaagtaagcctgcccgtcatcatctacaaacacacaagggtcaatcattgcaaaagcattacccaatccttcaatatatccctgcacttcaaagtctttggcgggatacttgctggtagctacaccgactttccaggtattattccagtcatcaccactcggatgcggaaaatagaagtaataagtaccgttcttatatgcacaatcgggcgcccacatgaatccaccgtctttacgtccccaaggcacctgtgaagagttcagaatttcaccatgatctgtccaatttaccatatcatccgtagagaatacatgatagcggtccatcaaatcgcacccacgtggcggatcaatgtcatgcgaagcgtacacatacaagcgtccgtcctcccatacatgggccgaagggtcggcagtatacatgtgagtaataaaaggattcggccctaaagtaaccgttttttgcttttggctgttacaactcatcaatgtgagcgacaaggcagccaaggtgataaaaaaagttttcatacgtatatttcctgttaaatcatattatcgattctatttaacgcttcggctgtgtttcctgaagagcaatctgcttgcgcaacattttaccggcctgtccggtgagccacagataatagtcagtttccagatcatcatcgataccttcaaaagtgatacccaattctttttctgatttgcaccaaccatcagtaggagctgttactttattcttcgccatgaaaacagtattctcagtgcttcttccgatgccgttcatgtctgaataagaaatcttttcattcttcgggttataaaccacatagtattccacgtcggccgcattactgggcacatcactctttctaagtaccttataaatagctgtaccttcatctatttcatcgaacatagcaatatacaacatcgtacaacctctgcgaatgcagttatggagttgagtccagaagaacttacctctttcgcgggatccccgttcatagtaaggatgcatattcaaatccgaagcacccggatagcaatgaggtgcatactgtactttgctttctccagactcattgcatttcttacaccattctatatccttaccgaccatgttggcaaatccaccgtcactaccacccgtgttataactattgatatcattgaaacgacctacataccagggcataattacatctacactcttgatgagagcatgcaagctagctcttccgggagtataggtatcacctccgccggcacgccagtaagtagatacacccagcatgatactgtaccccacttctttcagcttgtcagacaacttctggatatcctcattgctgtaaccacgttcagcaggattgaaacctaccccccaaagagcaattagcggtttgccattctcgtgcagataatatttccgtttggaggcataagtatcatagattacctgggcatcagcaacgactttctcaaaacgcgcaggattataaccgccaaggtcatacatcaccgcaatagcacgctgatattggtcggaaccatccatagcacttgccaataccttatcgaagtgatccttaccgtcgggattatcaatcacttcgcctacaaaacgctgcataaatgcaccgtcaatgccatactcctgcatccacttgaaatgcagcatcacagtagacttgtcataagcactatacacctgcgccgtcgttccatcaggatatttgaattctgtatcatacttgatttcatactcactcatatccggccagaggtcaatgctgttacgcagtacaccgggtttgaacatatcgttttcacgatagtgataccactccgtattcttatgattcgcatggctacagccatcgcccggtgtaccaaaccacccttgataaccggtcatcagcaaccctttgtaagtggtgtaaggctctccatctacatgaatggggacatccgcacgcgggtcttcaggttcaacaggtacctcaggcttttcgggctctaaagcaggcggaatataatcatcattactatctttgcaagaggctgtagtgcatgccacgagagcacagagcactaaataatatatctttttcaaattcatcatagctttatttattgttgttcagttaaatagaaccgggaaaagaagctgtatgcctcctctcccagctgcaccatcataccaatctaattacgtttctgttgtatttacttttgaggaatttcaactttcactatttccgtatagttgcacttttggaaagtatcgtcaaccctggcacccacacgaacaaagtaagtataaccgggcttcacatccaccttgaaagagaagatcttgctcttaccatcttccagtttttccagtttctcccaagtacttcttaccttggcaatatagttcttagcataaggtttctcgtcatcactacccatatcattatagtaactaatgcaattgccttcgccacagaactgattaaggctcaagaaaggacgtatatccagaattcggggaagtcccgctgtaataggaggaacatccagacggcaggagatagccagtgagtcatccaccagttccgtcttcagatcaatcagtttcagataaggagttacttcgaagtcatgaacagcctttttaccaatacctatacgaatagtatcggcaggccaccaggcgccttcgggaaccacgtcatacgtgcctttaaacagtttcgtattgttgaaagtgccatcctgcttcacaggaatcgtttgagaaccgggattaagactgaagcttttctcccagatcttcacccgtcctgcaccctgatcggccaggatattctcccccgtagttttatctataatacgtccagtgaagtgagcgtcgggttcatcaaaattgtccacttccatacaggaagtcacaaatagagttaatactccaaacaacagactatgtttcaactttttcatatccatatacaatttagtattaataaccatcattacgtataagattcggattcttgccgatttctccacccggaatctgttcatagtaccatttcttatcgaacgtagccttacgggctacaaccggcacttcattcaagaaaatccacttattctcattaagtacgtagtaagggagcaacgtatgcggttgtttaccatccataaagtcaatatcagccactctccaacgacgcaggtcatagatgcgcagattctcaaagcaaagttcacgtgcacgctcatcacgaatgtactgcaagttctcatctaccgggaatccgtatttctccatacccagatcttccggattattgaccatctgatgaagagtagcgcctgcacgcgcacggacttcattaacgtaagtaaatgcttccgccttcaacttatcatcaccggtttccaaacccaattcataagcggcctctgcccagttcagtaaaacttcaccgtagcggaataccttccatgactgcgaacttccaaaaagaccacctctaatagcaaggtttgagttagggttcgtatatttacgaatcaatgcccccatgtaggagtatccttcatcacccgtacctctgaaacaaccatgcggaccggctacttttacgttcttctgatcaccgatatcctgatacatctgacttgcttccacattctgtgccgtcacgcgataggcgttcgtatagtcattcgtgctgccaccggtttccgtagttccgtcagccgccgttccgggatagcttttgtatacaccagcctgaaaatcgaatttggtacccgaacctttctcagtcatacccgagaagaagaagatagcgcgggcacgaggctccatctcgcccgagttccagaggtcctccacattgtcaaagcgaacaggcttgccttcctcgtcggtcacggcaggtatctcgaacatacgaatcagctcccatgcgggctgtatggtgcaacccggagcactgatactcaagttactgcccttaggtagaatcattgaatcccaactgtgaaacagcatagtaccctgattatccttcaaggctatgtaatcaccatactgtttgataaagatatcctctggagtattgtctttaaagaactgctcggcataggcagtttccttgtcactaccgtcgttcagcgcataaccaccctccttgacaaacttgcaggcgtcataggcatattgataaaattccttagccttttcgggagcaacacccataagtcctgcatccacggctggtcctgttattttgccataactgccatattttgcagcagaagccgcatagagcatagcgcggctcattaacgctgccgctgcatagcggttgggacgactggcatctcccttggcagtagacatatgattcatggcatattccagatcattgtgaataaacatccaacaatcatactctgtgctacgaggcaattgcaattcagcaagcgatgctttcggatcgagtaccttgtccacaatgggcacacctccatagcgcttcaccagtccaaagtagtaaaaagcccgcaagaaaaaggcctcagcataaagattttcgtatgtttcttcattatagtattccttgtaattcggaaattgctccatgaaattattaatgtcacggatgcggtcgtaaggccaatatccccaaccgtcaccataggaagtggtacgtccggtagcctccatagctgcggatgcaggactcgctttctgcgcaccccactgattcgcttcgtgccaaccagccgcacagactgtgccgaagccattgtgttcaccattcatcgcaaagttgaagtcttcaatcggcaggtcctggaaaaccatggcccagtatttctgcagaccactttcggatttcatcaacacattttcatagatcagacctttgggttccaagtccaaatcataacaagatgacatcgtcaggcctaatgctgctgctacaaatatatatttgatctttttcatgttctatcctctcgtattagaatttaattgttgcaccaatattgaatgtacggtttaccgggtagttgtagaacaagacactctttttattgggatcttcgttcgcaccgcccttttctcccggacgctccggatctatattatccagtccggtaaaagtcaaaagattgtaagcattgaaataaacgcgaagatctttaatacctgccttagccaaccatgtcttaggcaaggtatagcccacttccaaagttttcaaacgaatatatgaagtattcttaatgcccgtgctacccgtattaaaactatgtccggtagccggatagagaccggatacccacttagtattcggattccacggatcgtccgtcggtttctccgtatgccagcgatcttcgtaaatattcagtacagcagcaccgttgaatggtcctacctcagtaaaaacttcactataggaactgtatacaccagctgaaccttgccagttcatagaaagatcgatacctttccaagcagcccccagtgtgataccgtagttgaataccggcaagttgaaggtagccatcggatgtctatccgaatcgtctataataccgtcaccattccagtccttgtaatagtagtcacctggcaaggtaccttgaccgtaattcgcacctgttgtaccatgataacggatatcatcgtaactgccgaaacgtccaccttcctcataagtaaaccaaatatccttattacgaccggaaacatctctgcgataccagttatccatagaattggaagcttgactatcggaatgataatcccaacgattcttggtcgcactgatttgtccgtttacccaataagtaactcctgccactctgttgcggtgccctaagctgatttcccaaccaaaggtttcatcactttccttattctcttgcggaagggaagcgcctacaatgccagggatctgtgcagaagaagtagccaacaatccatcacgtttacgcttaaatacttcaaacgtaccactcagtttctggttccaaaggtcaaagtctacgccaaggttataagtcttagctgtataccatgtcaaatccggattagggatagatgttgccgaaacaccggaaatcagaaccccattataaacatagcccaatttgctgggattaagttcataagctacagcagtctgtggataggtattggcgctaccatcatcacccatttcaccgtaagaagcacgaatcttcaagttactgaggaatggtacccactctttcataaaggcctcttcgctgacacgccagcctgcagatacagcaggaaagaatccccaacgagagtttttcgggaaactggaagaaccatcatagcgaaaagagaaatccaacatataacgacctttatagtcataattgaatctacctaccaaagcctgacggaccttatcgcccgcaagacctgcacctacaatctgattacttttctcaccatatatcagatattccccatccaacttcataatcgcttgtccgtagaaattatcccactcattatactgctcttcaaacaatatcaagccccccacattgtgatcgccgaacttattggcataattcaaagagagctgcattacggtaccatggctgggatcagttccccgacgtagataactgtcagcattacggtcataagtcttcatctctccacctaccatttcatacaattgataggcacgtttgtattccgtattgttcgatgaattgtaatcatagctatagaaagctttagcctgtaagcctttcacaccgggaatatcatacgccaatgtcagcgaaccattgaagtttgtacgcttctctctgcggtaaccggtgaaacgactgtcggtagtagccaccggattatcattgtcagaaagttccgagtcgtaactgggcaaatcatgatccccattcagccaagcctgtgaagtaggccgcaaagtccatgccttcttgtagaccgtccacatgtcagtaaacggttgattcttctcgtccatatagccgctcaactgcacggtagccttcaatctgtcagtgattttagcatccacgttactgcggaaattccagcggtcatagttcaacgaaccgctcttgtaggagccttcctgcttcatatagcccaaattaaagaaatagcttatcctcttcgaaccaccatccacactaatgttatattgttgttgcggtacattattatcaaacagttcgtcggcccagttggtacctctattgttcttggaactatattccatcatctgctgccatgtatatttcggcgaggtacgacggggatagttagtgccaaagtcattataagacttctcgttgatcaacaacatatggttggctgcagaagctgtttcaggcatatatagaaactgttgccagccatagttggcagaaaaagtaatatcaaacttaccatcactgctttctccaccatgcttggatgttaccaatataacgccattggcagcacgaataccataaatggaagcagaagcatctttcaatacagataccgattctatttcattggcatccatacgtgagaaatagcccttgtcacgaggaataccatcaaccacgatcaacggctcacccaagccacggatatcaatggcattatcgaattcaccgggttgtgaacttttctgtgtaatacgcacaccgggtatttttccggaaagcatattcaccacattctcattcttagtcacggcaatttccttattattaacagctgagactgcacctgtcaaagtcgctttcttctgcgtaccgtaacctacaactactacttcttccagtgtcttgctatcttcctgcaaagtgactttcaatacggtattagctgccgagactacagcatccagataaccgataaaggtaattgtcagtttatctttggcagaggcttctatcttgaacacaccgtctatatcagtgattgttcctcgggtagtaccgctcacccgtatgtttgctccgataaccggctcgcccgtattatcaatgacggttccctgaaccatccggttctgagccggcataggcaatgccgtcaggaggcatagaagtgcaatcatcatcgttttccatgaaaaaaatgcacttctttttattttattagaattataatgtttcatgcttagattttctgttcattaaagaaatcttcattttttagtgataagaggtgtacccgtcgcttgtacaggggtaccacctcttaaagtttacttagaggaatcttaaggcttgggagccggcattgttgcaccttccggagccacacgacggttgataaagagcatgcctaactgatctgcacctgctgcatggagcggtttcacaccgtaagcatattcataaccagcatcgaaagcaatgcggagcccataacctgtatagctttcagggaaattgaagtcaccggtcttttcatccattgtgaagtcaccgaagccccattcctttatattgttatagaaacctaccggatcattgatgtattcattatattgtcccatccagccgtcatagccataaccttcaccagcatcataagtcttgccgttgacatctgtatattttccatcagtacccaaagaagccggaacatagacagcaaagccacggaagaaataataaatgccacgacaaccttccgcatactttttggcaagatcccccatttccaacgttgatccattattgaaaatcaactcttcatcacccatttttatactatacttcagccaattaggaaagaatccatctgctccattatgaatggtagggatatccgtctcatatttagaaagagccctcgggaagttcagctttcctgcccccagtggttgagctttttctgtaccaccccactctgcttcgtagttaccgaccaacccgtttgctgtgaaatccacatcagccagttcatcaacaataaccacataaatcttagctttcactacgtcgtcagcaaccacattcaccaagaatcccggacgctcttcattatcattgaagctggttcccggccttgtactgaatttccaagtaccatcggattttaaactctccttaagcatatccactttctcctgtgcttttccacccggttgtttactactgctggcaactatgaattcagccttatcaggaagttctgagaatagattattgaaattcaaagttcccaacaggtcaagaccgtttatagtcatttccttgaaaccgtcggctaaatctctcggggcgtaatcagccttgatggtaacaccacctagatcttcggctacagccgaaaaatcatcagccactttcacattgaagtaatttgaaccgatgaccgttcctctgaacttcatttgcagagatacagcatacatctttccagcttccgcttcacccaacgccttaatgggaactacaatgaaaccaccatccagacttgccacaccattaaccttaaattgctcgccatcagcagcacgagttaacacatgagactcagcaatcgtaaattctgcaccttctatacttgttagagctggtcttggcaggaattttacaattgcgccagtattgccaatctctacaataccatctattgtttcggggctatagattaaagagttgacagcagaacccaatgggagtttatattccgtaccatttacattgatgatggcttccgtatcagtcattgtaacggaaatattacctccacccggttttatcacaattttttgtccatcactcaacgacaacgtataaataccagttttctcgtccaacttgacttctacaatacttgcaccagtcttcaaagccttatctaaatcagctttcaaatcgccaatagccgtttctaccactgatactcttgatttaagatcatcaatatcatcatcattattacatgatataaaggttcccgttgacagaaccattgctccgcacaggagcactttgataaattgcttattcataataattaaatagaagttattaaataaatatagaatttgattgtttccagaatattctttcagtattcaactgaaatgacctcttatagatttccggtggaagtctatacctacctttcatttgattaagtaacttgtgtctttccataattaataatttattaaatttaaaaattaacttcagcgattattcctcatcacatttaagaggattacatcaggtgaagggcactttacgcatagttgtgcatttttcatatttattaaactcgagttttaaaattatataagacaaaagtatgcctataccgttaatattctccttaaaaagacattaatagaagaggctttttaaagaaaaaagaagggttcaacagctttttaacgcttccacattaaaaaaggatatataaatagattaattgaaaagaaatgtagcttacaaactcgtattcgtcaattacgaatacgagtttgtaagctacaatacacaattttatccgatatggatagcccttttatgaattaaaaggcaccagctcctacaccattttcattaaaagcaatgatagaaaaataatattctgaatccctattgaaatagcgggcctcgtattgattgtcgtaaaccaccattgaatgggtaagtttttctttctgtgttccccaacgtaaaatgtatcctgttacatcttcttgagaatcccatacaaaacggtagatacgtttgtcactctcatcacgcgtagcctggaaacctgttacggcaacgggtactttaccatcaccttgtccgaagatacgcaaatcaaataaggagaaagagccttccatatcttttgaattgcagattttcaggtattgcattttcgctggtgtgaccagagtatgtaatttgtgaggagcatcttgctgattcttttcttcatttaccagacgagtccatttatttccatctaccgatccttcaatataatattgatataccaccggtccatggggagcatggatattgaaattatgatctgcaaaattaacctgaatagccttcacatccataggctcgccaagatcaatttgtaaccattcacctttgttaccagtctgtgcagcccaccaggtctcgacttgctcatcattagccaattccggttcgtaaccttcaagagaagaagatgcagctactttcttcttatacgaaagtaggttccaccccatgttgatatcttctttttcgaagtctactttcctgtcgggaatacagaagggataatctgcaaaagtagtaagcgcatacataccgtatttatcagaaacaactaccgggaataatcccaaacgacgttcgaaccagtgacgaacagagatagtcatggaagctacatgccagtaatttccatatttatccttgaaggtatgtccatgtccggcaccaccaataaaaccaccaggtttgaaagagaaaggattatcttctacatactcaaaaggccctaacggattatcgcctacatagttaccatcaccataaatacggtattgagtaccgggagcggcatactgtaagtaataccgtccattatgcttcagcacacacgggccttcgttccagccttggcgcggttcttcattattcttaccgggaacttcccaaccatatttatcacaattatgatgtatcaaagctttaggttcaccgatagcgcggaaaccatctttgggatccacttctacacctacaatcggatcgacatccgaacatccccaataaatataaactcttccatcatcatccttaaagaaggccggatcatgctgacgataagtcaactttgtatccacttcttcccaagcatctttttccggatgagcattcttataaatccgggtatttccactggaagcggtaaagtaaagtgtatcaccataaacaagaattgtaggcgcataatcctccatagtcggaatagttgtacaaggaatatattcccactttgccaagtcttcggagcgccaataaccaccggacttggaagcaaacatataataatatcctttaaaatattccagtaccggatcggcagcttcacgccgtgactcttcattcggttggaaacgataattcaaatcaataggatttgtcacaatccgatcactattaaccgtagtccgttgttccgaagcacaactggccaacaggcctgacagcaaggctatactaactaattccgcaatgcttttcatggtagttttatattaagtttctttcctttatactccacattcacagtatacgattcattatccaatcccaatcctttcagattatctacaacaacgatacggaagttacgattttgcaacatgccatcatagctaccctgacgaggatggatagttaactgcctatccttgtcactccacgtcatacggacagtggtatatttacctttttcgtaattatagttatcatcctcgtcttcatataaggtaaattccccatcggcaccgggatagatgcgaacctgtagatcatcccatgacttctcggttgcaaactgaacggaaggcccggcaggaatgatggaacctgctttcacatataatgggatgatatcaatgggagcttcacgactaatctcctgcccgcccttttgcttttcacctgtccaaaaatcaatccattgcgtaccctcaggcagatacagggagcgtctctttacttcacttattaccggagctaccaatatggactttccaaacatatactcatcgcctatatctgtaacctttttatcttccggaaagtcagagaacaaagcacgcatcagacttccaccattagaagtaacctcccatgaggttgaataaatataaggtaataatcgatagcgaagattaatcattttctcttgcgcatcgaaagcccagtatccacgttcaccaaacataaatatttcacggggagtgtttgtaccatgcgaacgcatcattcccgtaaaagctgcaaactgcatccaacgcacatacaattcatggaatgccggatctttcacaccttccggaaactttctatcagaaaagaaaccaccaatatcagaattccaataaggaatacctgtcaatgagatattcaaggctgccggaatctgattacgcaacacatcccaatcagaaacaacatcaccggaccatgcctgggcggcataacgttgctgacctgcaaaagcagaacgagtcagaataaaaacgcgtttatcggaagcctcctgtctttgatgatcataaacgccgcccacgcttacaagcgggaaagcattacgcactttacggaaagagcccagataagtttgaaaatccaagtctccttctttcgccgggctatgttccggttcggttgcatccagccaccaaccatccattccgatgctgaacatatttttattcatatatttccaatagatatctctcgctatgggatcataagtatcatataccttcacaccattatcctgcggaaaagtttcatgtatcatcaacttgttcagagctttcaaatcagcatagattccggtagcgggtccaaaagaaggccacacagaaataatggcatgggcattcagatggtgcacctcttccatcattttctttggatcgggaaatttcggattacgaaattctaccgcattccaatctttatggtcttctccccaataacgccaatcctgaataatgccatccagaggcaccttcaggtcacgatattttgcaacaacactaaccagttcatcctggctgacatatcgctctcttgattgccaaaaaccgaatgtccaaagtggaaacatgggagcctgccctgtcaattcacgcaatccagccactactttatctgctccaccgccataaacaaagtaataatcgcacaaatcaccaacctccgaatcaaaagtcattccttgtgcattgtctgtaaaagtggtaggagaataattatcccaaaacaacgcatagcctttgatggaatgaaccaaaggaatacatatttccgtattcgcctgttgcaagaaaagagtttgattacgctgattcatttttccccgctggtgctgtcccaaaccataaatagcctcatcactgtccaacaagaaagtttggcgaatccgatatgtagaattacctgcatcattgaaagaagtgaaacctgtggaggaaggtttttctgccaacaattccttcccgtctttagtcgcaaagcgaacctggttctgaacgatatccagcaaaacggtcagttcggaagtagtaagtattacctgattatttgcttcctgtatcttatacttcaccttttctggttgcatcgtaacagataacgactgtttttccggcgcttgcccaagaggatacttcttcacacgaataatggaagaagaaaagcactccagttccacacaggcagcttttgtctctacttttactccatgtgaagtacgcaatacagattgtcccattatggggacaatctgtatacacaggcatataaatgctaacagtttcttcattatatcaagtttatatagacaacactttatatttagtggtgaacagcacatctccgtcattattcttatccacactgaaaggtatcagtttctcttctcccggagccagttcataatgcacattctctcctgtcttcttacctccaacgtacatttctatcttacctgtatccatcagagtaccattgttcttaacagatacccagattgtcttctgatttttcagcaagttctcttcaactttgaacaatgacaaaccgaaatctgcggcaaattcatgagtatattcaagcataccggacaatcctttctttgcatccgcataacctacactatcttttatacggtcttttgccacatactgagggctaactccgccgactaatatcttaaactctcctttctctactactctgtccatacgatcattgagtaatgagagttcataaggtgtcagttcaaaagaaactgtctttgactcacccggttgcagatgaacacgagtgaaatctttcagctctgtaatacgcgttttcacgctggcatacatatcagttatatacaactgaacaacttcgtctccggcacgttgccccacattcttcacagttgcctgtactgcaacattaccattatccttttcctgtatcttcaaaccggaatattcaaaagaagtgtagcttaaaccatatccaaaataataaagaggataaaattccatgtctgaatactcataacgacgaccggaagtcttaaagttataatacagaggaagctgacctacatgacgcgggaacgtcatcggcaaacgaccggcaggattataatcaccgaacagcacatcagccgtagccggaccaccttcttgtcccggtagccagttaacaagaatagctttacacagttctgacgccttagacaagttgtaaggacggcctgcctgaagaattaagattacaggtttgccggttgcacaaacggcttccaataattcctgttgcttacccggcaaaatcagagtggcataatcatggttttctccggaagtcttgtaaacatctgtcgttgattcactggtagagcaatctcccaaaaccaacactactacatccgactgagaagctgctttcactgccttgggaatattcgtcccattcgaacttgtaaaatcacaaccttgttcataaaccacctttgtctgcttacccaccgcttgtttgatacctgtcaatacagatttcaactgaccgggtaaaagtttgggagtatagtcacccggctggagatcatccgctccgggacctactacagcaatcgtacgcatatctttagccaaaggcaatatgttatctttattttccagcattacaatagattcgcgtgctgcctgacgtgccatttctttatggctgtctgagttccatcccggatatatcttattccagtccaaaggtttattcggtgtcttttcaaacagttcgttacggaacatcatacgcagcatggtgcgacaaacctcatccaggttttccatattgatatgtccgtcttttgcagcttgtatcacctctttgtcattgtaagtatcaccacaattggtagcgatgcctgccgccagagcctgattagcggcttctatcttatcttttgctgtataatgtttacgggcagtcagattaccgatagcaccgcagtcactcacaataaagccgtcaaatccccattcctcacgcagaatactatgcaataactctctgcttttagcaaccggcacacctagataatcagaataagccatcattacagattggcagtcatagttgcgaatcacatgacggaacggaaccagatgcacctcacgcatttcacgttcggacaaaccgatatcatgggaatcacgtccgcccaagggggcgccatgcccaccaaaatgtttcggagtagtaaacaagcctttagattgatatcctttaatccaggctccaccaatttgtgataccagcacagggtcttcaccaaatgtctcctcacaacgtccccaacgtgcatcctgtgccacatcgagtaccggagaccatgcctgcatagtacctgctgcaagagtttcgtcaccaacagccatagcaacatcttctgtcagtttcttattccaggtggctcccattgccaatgcttgcggaaaaatagtagcaccgctaccgtatgaaaacccatgcaccgcttctacttttgtaatgggcggtacatataaatgaggaatccccgggatcccccatccctcacgaatcaattccatcttgtcttccggagtcattacactcagcagactttccacacgttcttccaccggaagcgtcggatccatataacgaagagatgttttctctccttttcggtctttcagcactttatctgccaaaagcaccgctacctctttcaccgaaaaaggtttcacacggctatcgcctttaaatgccagtcgaacgtgagcaccgtatttaggtgaaaacgtgacctgcatttcttttgcactacccttcacctgatagtctaccggaactcccagattcatcggatcataagtaacaaatacactcatcagttgcttcagttcttcctttgatacaccctgcatctgaaggttaagttcacacacatcaccaggagtctgtatggtaaacatcagccactggtccgccttcagatcctgaccattcacttcccacatcgttttcggatctttatcaaaagccagcgaggctttctccagtttggttgatgccgacactgataagatatcacttggctgttgagccattataaaagagcaggacaatatacctgcaaaaagaaacaagtgctttttaaaattcatactatcagatattaattttactctgtttaatgttgcaaagtaaacggtaacctattaataaaacagtgaaactataattaatgaaacattaaaatccgcttaatgaggctctttaagtgaaaaagaaaagtcctctccgaagaattgtataatttagtaattgcttttcaccgaaaaatattacttttgtccaagctaatacttcataaaggaacttcagaatgaaaaagacactatctatattcttccttttatctatatgcttgaactcaatagcccagcttcctgaatatggtctgcatatccagtcctacccacttcagaactccgagttcaccagtatggcattagaagatggaaagcccatagataccaaaggagaaaaagtcaccctgaactttaacctttggatcagaccggataatgtattcggaaccgtgttccgaattattacaaatgacaataaaaatatagatttaatgtacagcgtgggtgagaatgacaggcgtttccccattctggtcaccggagatgccgtacatcccatccaaaaagaagcaagacgtgaaatctgggtttcagtcagcctgacttttgaccccaaagacgggaatataacagtactttacgacagcacacaaattaatgtcaactatccggcattaataggtgcacaagaaatacgcattgctttcggttattgtcctttcgaagatttcgtgttagatgatgtagcttccgttaacctgaaagatatcagtctgaaacgcgggaaccaggaaatccgtctatggaaaatggcgcgtcataatggagacatttgttatgatgaaacatctcataagcccgcttccggcaagaatacacagtggattatcgaccaatacattacttggaagaaaatctattcacaacattttgccacctctccttccattgcgttcgatcccactgtcgccacgttctatatagccaacgataataagagactatacgtttttcacgcagatgaaaaaatgacagattccatacgggtgaaaggtggagaattcgtagcaaactatccgaaccagcttatctacatcccccaacgccatcagttactatcctacaatctgaatgaaaatctttattcggcattcgattctaatacccagagttggaaaggaacgcaggcccccgtcgcggaacatgactattggaacaatacgctcgtctacaatccctccaattcctcactaatcagctttggcggatatggacattatcactataacaatagactactaatcagttacccgtatgaaaacacaccgcaacggtatatcaatctgactaatatccatccccggtattcctccagttccgctcttgtggacagtacactttatatcttcggcggtcgtggttgtccgtccggacgccaggaattatctccccggaattattatgatctttattcggtcaacttactcacccaacaggtcaacaaactatgggaagcccctcaaaatccggatgatggtgacttccaacctggcgaaaatatgatttatgactcggaaaaagactgtttctatttcttctgtacacaattaggtggtatcctgatgagaatcgatacaaaaacgccacacttcgaacccatgtcattgcccatggggctaaaattccctggacaatatctatacagtaatctatattattccccaaaacagaagaaactatatctggctgtacaccaggccgaagtcagcggaaaagcagatatagacatctatgaactgaattttcctcctattcccgtttcatcattcaaacagtccgaagtgtctgaagcccagactgccggtagcaataagctctatgtttggctatgcattatcggaggtttgcttgctatcggaataggaactctttattacagaaaaaagcgcaccatactcgcccggaatgaggaaagtaaatctcagaagacaaatgtgaccgacaaggctcccaatgctctccagggacaagagaagccggaaatcaagattgatatgcctatcaacatgtccgtccccacatttcataactatgacttctccaggaaatgcatttgtttctttggtggtttccgtgtcattgacaaggaagggaatgacattacattttcctttacccctaccctcaaatacttattgatattattgattctttatacgggaaaagattccaaaggtatcattggaaacaaattgattcagttgttgtggtatgataaaacggaagaatccgctaaaaacaatcgtaatgtatatatgagtaagcttcgcagtctgctggacaaagtgggtgacatcaagatattgaatcagaatggcttctggagcatacaatttgagaatggcaccatttgcgactacctggaggctctccacttatacaacaagaacaatagtcaggatctggaaaagctattggagctgttattgcgcggtatgatgcttcctaacattgagactgattggatcgatacattcaagaatgatttctccaatgacaccatcgacttgttatgccgattattaaagcaggaggatctttcggacacgctgaaattgcagatagcggacaccctattccagcatgactacatcaatgaggaagccctctgcataaagtgccgcattctttgccaacagggaaagaaaggactcgccaaaaccgtttacgatgctttctgtaaagaatatgcagcttcattgggaactacatacaaatattccctaatggaaatcattgatgaacagaacaagaactaacgtaccggttgcttcatctccaacggtatttccttacgcaacattttaccggcctggcccaccagccacaaataatgatcactaccaatgccttcctcaatgggcacaaatgtactggcacctacgggaacctttttagcacatttaaagatagccgtaccttcatctatctcatcaaacatagctacataaagcatttccgcaccttccttcaaagctccggacaactgcttccaaaggaacgaacctttgttacgcggtatctgcacactgttctcatgccccttcatattacgccaggagaatcctgggaaagccaaaggtgcataatccactttattctttttcgcccactcgatgtcacctttaatcagtttctgataacgaggatacgagtcttcattataccgtcctacaaaccagggcatcacaacatcacaccgttttatcaactcatgcagacgagggtccgattcggtatctccactcaattcgcgccagtgtgtaggcactcccaacatcacactaaagccctgtgccttcaaaccattgataatcttttcggcttcatccagaccgtaacggcgatgatcattgaaacctactccccagaccgtaaccagcggttttccattatgatacagataggagggattcttggcatgatctttcaaagaatgacgtttagccacatcggcaatatcttttagcaaaacatcctcatcaccgggacgcataccacttaaatcatacatgacacaaatggcacgctcgtatttattggcggctttcatggcagagttcaaaacagtattgaaatgcttcaaaccactctcaccacggatttccccgacaaaacgctgcataaacacaccatccaatccatattctttcatccatctgaaatgagtatctaccgtagactcatcgtgcgaagagaaagtataagcgggcgttccgtctgcaaacttgaactccgtcttatatagtcttttatactccgacacttccggccagaagtcaatcgtacaagaaccggggcgaaagccatcgtgtccggtatagtggtaccacccccgattggcgccatcatcaggggcattaaaccacccctgataaccggccatcaccaatcctttgtacgaattgtactgtttaccggcagcctgcgccgtaatacctattgaaaacaacaagcatacaataaaccaatttaatctttttaccataacctatttctatttcttattcgtaatatcgattgtcagaatgctctgtgcaatgtgtacttttctcccggttgtgtctgtatatcatactcataaatcttatacaagagaggatattgcgcccttaatccggcagcgaccagcggttccttaatagatccgcgcttcatcaacggattcggattatcacccttcgcttccttaagacctgtaccttccaacggcacatacgaacgtatacgcagattgccgccaatgcgtgaagttacggtagccgtagtcaattcaccgtcatcccaatccatgtccacttcaaaagcaccgcgggctaccagaccttttacgctacccttgttccaatcctgaggcaaggcgggcaataaatgtaaagcctcgtcatgactttgaagtaacatctcggctacaccggcagtgaaaccgaagtttccatcaatctggaaaggcgggtgtgcgtcaaacatgttcggataagtacgtccgtcaggattatccttttccaccagtttcaacatattcttgataatcttataagcatgatcaccatcgagcagacgtgcccacagattgattttccaaccgatagaccaccccgtagccatgtcaccccgatagagaagtgagcgtttagctgcctggaaaagctgcggatgcgcatagggggaaatctggttactgggataaagcccgtacaagtgggaaacatgacgatgatcattattcggatcatccacatccgccagccactcctgcaactggttatgcttgcctatctgcataggcggcaaacgcttaatcatgctttgcagactatcccgataggaggtattagcgggatacaacagttgggtagccgacagtacggaagtcaatgcatccagcacaatctgggtgtccatcgtacatccggcagtaatcattgtaccggttcccggagggccctgttcgggagacatagaaggtgcacagaccatccaaccatatttaggatgttccaccaggaaatccaggaagaaatcggctgcccccttcaaagccggatatgctgttttcaggaatgcctgatcgcctgtataaagataatgttgccacagatgttggctcagccaagctccacccaacagccagacatacgaagcaccatccacaggtccggccatacgccacagatccgtgttatgatgtacggtccatccacggcattcatacaaggtgcgtgctgtgccttgtgccgactctgacaattctttcaccatctggaacagcggttcatgcatttccgggagatttgtcacttctgccggccaatagttcatctccgtattgatattgatggtgtactttccatcccacggagccaatagttcatgattccagatgccttgcagtccggcaggctgtccgccgggttgcgaagaggatataagcaggtaacgcccgaactggaacatcaacgccaccaaacccaaatctttcctttcattgaaatgcttgatacggtaagatgtctcctcttgactggagggaccgatgttcagagagacacgtccgaaaagcttttgataggcttcttcatgagcagtaatcgcctgggcataagggcgtttcatggcttttgccagaaactccgttacccgacgggtttcattggcacttacatctttataattgacaaagttggttgcagccgtcacataaatcacagcagcatctgcacctttcacttcaatgcaatcattggtgacattgactttacccttctccgcctttatctgtgtgcgggtttcaaaacggatagctccaggaatgccttcgtgcgcagaaccatgtccggacaacaggaggcttttgccattcttctttatctcgtactctttatacggggtactatatctggttgtaaaattgactgcaccgggtttatccgcctcgatacggatgatcaaagcattgtctaccaaagaagtgaatatggtacgggtataattcacttcgcctatcttgtaccgcacggatgcgactgcccgttccaagtctaaatctctgcgataattggagtaatcggcatgtccgtcaaattccagcatcaaactgccaatcgtctggaaaggcatgccatgctgcccggtaaagaagttatcagccataaccttttcggcttccttctcacgtccggcaaaaataagttccctgactttgggcaatacaccgaatgccttcggactatcgttgcgatgaggaccaccgccccagacagtctcctcattcaactgtatctgttcgttaaccactccgccatagaccatggcgcccaaacgtgaattacccaaaggtaatgcttcggtccatactttggcaggttgctgataccagagttttaagtcatcagctttagccatcaagcagcaagcacatacaatgcacagacctatcaaacggtttttcatgattctttaagtttatgttttccgaatgcaaagaaaagtgtgacccattaataatatcaatgaaaagacattaatatcgacttaaaatagaattaataaggattaatgtcgaaaataattcatttttttcggttatgagttaaatgataatcttgtatgataagcgccccatatacagatgaccaatatttacacaataagatatttgtgagatcagtatgatacttagggtatctcagtatgatacttaggatacctcagtatgatactgagaccacctcatcagtcgtatgctgaaatacgttcattataacaccctgataataaaccatttacaaaagacatcttcatcattaataaattcgaacaaacgaactgtttaaaatgataaattattttctctcttttctgttatggatcaaacaatagtcgatatacactacgccttataccaaagtcacaatggcacacgactctttcttctgttatcattctttttcaaagggataaagcaagcattcccgatataattgctacatttgcagggtaatcgataaaagaagtacaagaaaatggacttaaacaaagtatttgccaccgtgcaggaagccagccgggaattgttatcactgagcgatagagaaatcaatcagatactattggctgtagcggacgctgccttggcaaaatcggacttcattctcgctgagaacaagaaggacctggaaagaatggatccaaatgatccgaaatacgaccggctaaaactgaccgtagaacgcctgcaaggcatcgctgccgatacacgcaatgtagcaacccttccctcaccagtgggacgcacgctgaaagagcacacacatccccaggggatgaggctcagaaaggtaagtgtcccgtttggcgtcatcggcattatatacgaagcacgccccaacgtgagtttcgatgtattttctctctgcctgaaaagcggaaatgcctgcatactgaaaggcggtagtgatgccgactcctccaaccgagccattatcagcgtgatacacgaagtactggaacatttcaacatcaacccgcacatcgtagaattactgcctgccgaccgggaagctacagccgagttgctgaatgcccgggggtatgtagacttacttattccgcgtggcagcagtagcctcatcaactttgtgcgtcaaaatgccaccatacccgtcattgaaacaggcgcaggtatctgccatactttcttcgaccgctacggtgatgtagagaaaggtgcagctattatcaacaatgccaaaacgcgccgcgtcagcgtatgcaatgctctggactgtctgttgattgacggtgaccgcctcaacgatctgccggcactttgcacaccgttgcaaaaaagcaatgtgataatctatgcggatatgtacgcatacaacgtactgaagggaagctatcctgcggagttactgaaggaggccacggaagaagacttcggtacggaattcctggactacaagatgtccattaaaaccgttcagtccattcgtgaagccatagcgcatattcaggaatacggttccaaacacagcgaatgtattgtaaccgaagacaagactcgtgccgagtggttctgtcgtgatgtggacgccgcctgcgtatacgtcaacgtaccgacttcctttacagacggagcgcagttcggtctgggtgccgaaatcggtatcagtacacagaagctgcatgcccgcggtcccatggctctggaagaactgaccacgtacaagtggattgtcgaaggagaaggacaggtaaggaagcgataactccttcttccccccctcttactcctaattcatattaatcataaatatataacatgaagaagtttacttgtgtgcaggacatcggaaatctgaaagctgcactggatgaagcatttgagattaagaaagaccgttttaaatacgtagaattgggacggaacaagacgttgatgatgattttcttcaactctagcttacgtacccgtctcagcacgcagaaagcggctacgaatctaggtatgaatgttatcgtgctggacatcaaccaaggagcatggaaactggagacggaacgcggcgtcatcatggatggagacaaacccgaacatctactggaggctattcctgtgatgggttgctactgcgacatcatcggtgtacgttcgttcgcccgctttgagaacaaagaggatgactataacgaggtaatcataaatcaattcatccaacattccggtcgcccggtgttctcaatggaagcagctacccgccatccgttgcaaagctttgccgacctcatcacaattgaagaatacaagaagacggcacgccctaaagtggtaatgacctgggcgccacatccacgcccattgccccaagccgtgcctaattcattcgccgaatggatgaacgccacggattatgatttcgtcatcacccaccccgaaggctacgaacttgctccgcaattcgtaggaaatgcccgtgtagaatatgatcagatgaaagcgttcgaaggcgccgacttcgtctatgccaagaactgggcggcttatgccggagataattacggacaaatcctgagcaaagatcgtgagtggaccgtaagcgaccgccagatggcagtaaccaacaatgcttatttcatgcactgcctgcccgtgcgccgcaatatgattgtaacagatgatgtcatcgaaagtccgcaatctattgtcatccccgaagcggctaatcgtgaaatatcagctacggtagtattaaagagattacttgagtcactctgaactgaataaagagttagaggagatagaaggagctaaaagagttatcagcccgcaagcgggcttaggagttaaagccgataaagttgtgaatcaccagcaggagtgttggctttaactccttctaacttctgtaactcccgagcgaagcgataacttctttctcctttaaaaaagctcctcagcatcaaaaataagcaagcatattttgtactgctttcggtttgcattatctttgtccccaaacaacgccaaggattatgactataaaagagtttttttctttcaaacagaataagtttttctggataaacctgatcgcaatggtcattgtggttgcccttgtactgtttggagtgctgaagggactggatatatacacccgtcacggtgaagcggtagtagtgcccaacgtgaaaggtatgggagtggcagaagctgaaaaaatgttccgcaaccaaggacttacctgcattgtttccgactccagctatgtaaagaacttaccagccggatgcatcctcgaacacaatcctgccgccgggcagaaagtgaaagaaggacgcaccatctatctgaccataaacaccctgagtacccctttgctaatcgttcccgatgtagcggacaacagttccatgcgccaagcacaggcacgcctgctggcggccggcttcaaactgtccgagaacgaacgcatagccggagaaaaagactgggtatacggtgtgaaatataaaggccgtacactgaccaacggtgaaaaagtacctgtaggtgccacacttacactaattgtgggagacggtggagaactgcctcaggaaggggattctacagcagtagaagctaccacccctacctcctctaaagattccgcagcagacgagtcctggttttaaactcgatcatacggggaataataacaataacacatagaaagaacaaggaatgatagaagatttgccggacgacatagtgactgaggatgatctggacgacatagaacctgtcggtgatgaagcccaactctatgaacacttccgtgtggtagtggatagaggacaggaaatgatgcgcgtagacaaatacctgttcgaccgcctgacaaacgcttcgcgcaaccgcatacagaaatcagcggaagccggttttgtaatggctaacaacaaaccggtcaagagcagctacaaggtgaaaccgatggatgtcatcaccatcatgatggatcgtccgcgttatgaaaacgaagtcattcccgaagatattccacttaatataatctacgaggataaatacctcatggtagtgaacaaacctgccggactggtggtacaccccggacacggaaactaccaagggactttagtgaacgccatcgcctggcacatgaaagataatcccgactacgatgccaacgacccgcacgtcggtctggttcatcgcatcgataaagacacttccggactgctcgtcatagccaaaacaccggatgccaaaaccaaccttggtatgcagttcttcaacaaaaccaccaaacgacgctaccgcgccctggtgtggggaaccgttgaacaggacgagggaaccatcaccggaaacattggccggaatcccagagaccgcatgcagatgaccgttctgcccgatgatcagggaaagcatgccgtgacccattaccgggttctggagcgtctgggctatgtcactcttgtagaatgcattcttgaaacgggacgtacccatcagatacgtgttcacatgaaacatatcgggcatgtactcttcaatgatgagcgctacggcggtcacgagattctgaaaggtacccatttcagtaaatacaaacaatttgtaaataactgcttcgatacttgtccacggcaggcattacacgccatgacactgggttttgtacatcccgccaccggcgaagagatgtacttcacctccgaaatgcccgaagacatgaccttgctgatagacaaatggagaggctacatcagtaacagagatttagaatgaaacgcacgattgctattgtttgcggaggtgatacctccgaatttcaagtttccctgcgcagcgcacagggtatctactcctttatcgataaggaaaagtacacattatatattgtggagatgcacggactcgactggcacgtgcaactgcccgacggcggcaaagcgcccattgaccggaatgacttcagctttcagatgaatggcaggaaggtaacattcgactttgcctacatcaccattcacggcactccgggtgaggacggacgcttgcaaggttatttcgatctccttcacatcccctactcatgttgtggtgtactggcagcagcacttacgtatgacaagtttgcctgcaaccaatatctcaaagtttttggagtacgcatagcagaatccttagtgcttcgccaaggacaatccatttccgatgaagatgtgattgaaaaaataggtttgccctgtttcatcaaacccagtctgggaggttccagctttggcgtaacgaaagttaagacgaaagaacaaatacagcctgccattgttaaggcattcgatgaagcgcaagaagttctgatagaagcctacatggaaggcaccgaagtgacctgcggttgttataagacaaaagagaagtcagtcgtattccccatcaccgaagtagtgaccgagaatgaattcttcgactacgacgccaagtacaacgggcaggtttccgaaatcaccccagcccgtctctccgatgacctgacacaccggatacagacactgacttccgccatttacgatatcctgggcgcttcaggtatcattcgtgtggactacatcatcactgccggagataaagtcaatctgctggaagtgaacaccacgcccggaatgacggctaccagcttcataccccagcaggtacgtgccgcaggattagacattaaggatgtaatgactgatataattgagaaccagttttagtgactaaactactaatcgctaatcactaaacgttaatcattatgaatatggaatttgatgaaatccgcccttatcatgacgaggagcttcctcagatttacgaggaactgattgccgatccggctttccagcaggtggcgtctgctgttttcccggaagttccctttgaggcacttgcgcagaaaatgcgtacatgcaagacgaagttggagtttcagaaagcattctgttacacaatcctgaaaagatttgccagagacacgacccagggagtaactctggaccttacggcacagacggacaagacatccgcttatacttatatctctaaccaccgcgatatcattctcgactccggtttcctgtccgtagagttgatagacaaaggtatggatacagtagaaattgccatcggcgataacctgctgatctatccctggattaagaagttcgtgcgtgtcaacaaatcattcatagtacaacgtgccctgaccatgcgccaaatgctggagtcttccggacgcatgtcgcgctatatgcaccacactattaaggataagaaccagtctatctggatagcacaacgtgaagggcgtgccaaagactccaacgaccgtactcaggaaagcgttctcaagatgctggctatgggcggtgagggtgacatcatcgaccgcctgattgaaatgaacatccttccattggccatttcgtacgaatacgatccttgtgattacctgaaagcacaagagttccaactgaaacgcgatataccggactacaagaagacgcaggaggacgacctgaagaatatgcagaccggcttgttcggacctaaaggacgcgtgcacttccaggtagcgtcgtgcatcaatgaagagttggaaaagctggaccgttctctttccaaacccgaactgttttcacagatctccgcccttatagatcggagaatccatgcaaactatcgtatgtatcccggcaattacatagctcacgattatttgtcgggcacccaggccttcgccggtcattataccgccgaagagaaaaaacacttcactgactacatcgaccagcaacttgcacgcattgaactgcccaataaagacatcccgttcctgcgcgaaaagatgttgttgatgtatgccaatccactgacgaattatttggctataagaactgataatccgaaatagagtaatatatgaaaggtaagctacaatttccggtttctttatgctggtttcttcccgtactggtattcatgctggtttcctgcggcgatgacgatgattatcattatccgtccgtaaaactggacttcctgactgcacaggccggtgccgacggcagcctgcaatccgtgctgacggatgaaggcgaaacacttgcaatagtggaagacgcgtcgaaaacacgtatagacgctaatgcctctgcccgcattgtcagcaactatggtaaggcggaagctgccgatgggacatccggagtgaaattgtatgcagtattgagtgccatatcgcctgtgccgcagtctgcggataaatttaaggatggaatcaagcgtgatccggcagatatactgagtatctggatgggaattgattacctgaacataatgctggaaatcaagtcgcagaacggaaagcactcgttccatttcattgaggacgaagtcaccacggataaagaagcaggaacccggacggtacgtctgtctctctatcatgatgatggcggagatgtgcaggcatacacgaaacgtgcgtatgcatccgttccgttacggcaatatgcagaggatggaattgataaagttacaatctatttcagcttaaacacgtattccggcaaagaagtaacttatgaatttgaatataatccccagtaagatgaaaataaattctttgattgcaggcatctgcctattcttctcctctcttttctcctgtcagcagaaaggagatttcaagtctgtatccgtggaagatttctccacgctgatagccaatcctgagatacaacgtctggatgtacgcaccgtagccgaatactcggaatcacacattcccaaaagcatcaacatcaatgtacttgataagacttttgcgggaatagccgactccactctacagaaagataaacccgttgctttgtattgccgtagtggtaaacgcagtaaaaaggctgccgctatactcagcgaaaagggatatgtggtttacgacctcgacaaaggtttcgaagaatggaaaaaagccggaaaggaaatagaggaataataaggaaaaaacgttggtgaaactaatacgtttcagattcataagggtataggaatgaataagactcaccacagattacactgattcacacagatttattaatctaataatcagtaaaatagaatctgtgtcaatctgtgtaatctgtggtgaattaattcataaccaaaaagaaattaattaattccgccaaagctttatcgtcacaataagaaaagccgcaaagcactgttatcagtcctttgcggctttcttattctttattacaaagagtttacttatgctttcactccgttgtattcgtcagaaacagtcagtttcttgcggcctttagcacgacgtgcagctaatactctgcgaccgttagcggaagccattctctcacggaaaccgtgtttgttttttctctttctgttagagggttgaaatgttcttttcattactgtatattgttttatgttattatttcacgtaatcgggctgcaaaaatagggacttttttcaaaataaccaagagttaagtctttttctctcaaaactttttgcgatttttactgatttccattacttttgcacccgcaaagctcagtggagacaattatataacatctaaaataaaaaatattagtatgattaatgcccaagacattaaaattggaacttgcatccgtatggatggcaagctgtacttttgtattgacttcctgcatgtaaagccgggaaaaggtaataccttcatgcgtgtaaaactgaaagacgtagtaaacggttatgtactggaacgtcgctttaacatcggtgaaaaactggaagatgtacgtgtagaacgtcgtccgtatcagttcttatataaagaaggtgaagattacatcttcatgaaccaggaaactttcgaccaacaccccattgcccacgacctgatcaatggtgttgacttcctgttggaaggtgctgtgctggaagtagtatctgatgcttctactgaaactgttctttatgctgatatgcctataaaggttcagatgaagattacttataccgaaccgggtgtaaagggtgatacagctacaaatacgttgaaacctgctactgtagagtctggtgcaactgtgcgcgttccgctgttcatcaatgaaggtgaaacaattgaaatcgacactcgtgacggttcttatgtaagccgtgtgaaggcataagccggtctccgcctacatagtacgattatacaagctgcctgtcagaagaattaaacacttctggcaggcagtttttttctataggagagcaaaagaatatacgattgggaagattatcggaaaagaatggtttatctttgtaagcaataagcaatagaattgcaccatgagtaaactgataaagacagacaacgaatataaagagtggataggcgaactgaaacagcgtatccgccagagtcagattaaggcagcggtaaaagtaaatacggagttattgaaactatactggagtataggaggtgatatagtccggttgaaagcggaagcaaaatggggagatggcatcattgaacaattatcccaagatctaaagacgaattttccagatatgagtggcttttcttcgcgcaacctttggtatatgaagaaatggtattctttttattctcagcctgatacaaaactgccacaagttggggcggaaagtaaaagtgagaaactgccacaagttgtggcagaaatagaaaagctctttttcgcagttccatggggacatcaacgctgtatcattgataaaataaagaacataaaagaggctgtattctatattaataaaactgtagaaaatggctggagccgaaatatgttacttaatatgatagaaagtagtctctattacagagaaggtgcttctattaacaatttctcatcatgcctaccggcatcacaaagcagccttgcacaggaactaacaaaggacccttataatttcgacttcctcaccctgcgtgatggttatcttgaacgggagttggaagatgccctaactgacaatatcaccaaattcctcattgaattaggaaatggttttgcctatgtaggacggcaagtacgccttgaagtcggtggtgatgaattctttatcgatctgctattttatcatctcaaactacgcagttatgtagtgatagagttaaaaacgggagacttccagcccgaatatattggtaagttaggtttctatgtctctgccatcaatcatgagatgaaactgccacaagacaatccaactataggattgctaatttgtaaaagtaagaacaacatagtggcacgatatacactggacacagccaacctgcccatcggtatctctgaatatgaattaagtcagctttacccaaaagatttcaagagtaccctgcccagcattgaagaaatagaaaacgaactaaaagattaatacctatgagatactccgtcattattcctgtatacaaccgtcccgacgaagtagacgaactgttgcaaagtctgaccgaacagagtttcaaagactttgaagtcgtaattgtggaagatggttcctccattccctgcaaggaggtagtgggcacatatcaggataaactggacatacactattacaacaaaccgaattccggtcccggacaaacccgtaactatggcgccgaacgaagcgcgggggaatacctgatcatcctggattccgactgcattctacccgcaggttatctcgccgccattgaaaaagaactgcaagccagtcctgccgatgctttcggcggaccggaccgggctcacgagtcttttacagatatacaaaaggccatcaactactccatgacctctttcttcactaccggaggcatccggggaggaaaaaagaaaatggataagttctatccgcgcagtttcaacatgggtgttaagcgagacgtatatgccgcattgggcggtttttcaaagatgcgattcggagaagacatagacttcagcatccggatatttaaaggcggttaccgctgccggttattccccgatgcatgggtatatcataaacgccgcacggacttaaagaaattcttcaagcaagtgcataattcgggaattgcacgcatcaatctatataagaaatatccggaatcactgaaagtcgtccacctcctgcccgcagcattcacactgggagtagcggtactgctgcttggtgctcctttctgcctttacagtctgacgcccattgctttgtacgcactgctggtatgcatagactcttccatccagaaccgaagcctgcgcatcggcatctattccattgccgcctcctttatccaactcatcggatacggcacaggcttttggagagcatggtggaatcgctgcatactcggcaaagacgagtttgaggctttcaaaaagaacttttataagtgattagcgattagtgattaacatggagaaactgactatcaatcagtgggcggaagaagaccgtccgcgggaaaaaatgatgctgaagggagcggaagccttgagcgatgctgaattgcttgccatccttatcggttcgggaaacacagaagaaagcgcggtatcacttatgcaacgggtactttccacttgcagcaacgacctcaatcaattgggtaaatgggaagtgcaggacttttcccgcttcaaaggcttcggtcccgccaaaagcatcaccatcatggcagcattggaactgggtaaacgccgcaaactacaggaacgtccggaacgtgccaccatccgctcttccaaagacatctacgaaatctttcacccgcttctttgcgacctggcacacgaagaattctgggttttactccttaaccaggcttcccgcgtcatcgacaaatcccgcatcagccgcggcggcatcgaccagactactgccgacgtacgcagcatcctgcgcgaagccttaatacaacgagccacgcaaatagctctgatacacaaccatccttccggaagcccacgccccagcacagacgaccaacgcctgacgcaacttgtccaaaaaggcactcagacaatgaacatccgtctcatcgaccacgttattgtaacagacggaaagtattatagctttaacgatgaaggaatgatttaagagaaagcattaaaggaagtcacccggatcttccttaccgctcatgtaaaagatggcatcttttgctacgaaaggtggcatctttcacatcaaaagatggcatgttttgctacaaaagatggcatcttttacatgggcggtaagaaagatacagatgaaagatagtaatgtttgatgtaaaaggtagtaatgtgcttaataaaaggtcttaatattcgagttgcagagtgcctgtgacaggctttttcaaaacccgttcctttgtagtttcaatttatttctttagctttgcttcacgaagatgagttgcattcagcataatgcaaataaatttgcttctgcttccggtttcaactatctttgcctaactaaaatgaaacgaatatgaccaagtttgaaatagaagaaaaaatagtagcgatgctcaaaaccgtattcgacccggaaatcccggtaaacgtatacgatctgggacttatctacaaaatagatgtctccgacagcggagaagtaaatattgacatgaccttgacagcccccaactgtccggcagccgacttcatcatggaagacgtgcgccagaaagtggaatcagttgacggtgtatctgctgccaccatcaatctggtgttcgaaccggaatgggacaaggacatgatgagcgaagaagccaaactggaactgggattcctgtaatttgcaattagtaatttgtaactcaccagaatagcacggttatgaagaatgtatatttcctttcggacgcacacctcggctcacgtgccatcgaacacgggcgtacacaagagcgacgcctcgttaatttcctcgacagtatcaagcacaaggcttctgccgtatacttactgggagatatgttcgacttctggtatgaattcaagaccgttgtgccgaaaggatatacccgttttctgggaaagctgtccgaactgacggacataggagtggaagtgcatttcttcacaggtaaccatgatatttggtgcggcgactatctgacccgcgagtgcggcgtcatcatgcaccgcgaaccgctcaccacggaaatatacggcaaagagttctaccttgcccacggcgatggtttgggcgaccccgacaagaagttcaaatttctgcgctccatgtttcacagcgaattcctgcaaacccttttctccgccatacaccctcgttggagtatggagttaggactgaattgggcaaaacatagccgtctgaaacgtgtggacggcaaggagcccgactatatgggtgaagacaaagaattcctggtgctctacaccaaggaatacctgaaaagtcacccgaatatcaactacttcatctacggacaccgccacatcgaactggacctgatgttgagcgccaccgcccgtgtcaccatattgggagactggattaattatttctcctacgccgtattcgacggtgagaatctcttccttgagaactttattgaaggagaaaccaaactataatccatcccggaagcccccttaaagcgccaaccaaccgcccaatccgatatgaatcttttaagactgaaacacctttttgccggatgtttgcttgccgtaagcacccttccggcatggggacaatccgcccctacccttgctatccgcatcgacgaccttggagctttccactccgtcaacgaggcttgtattcaaacttatcagtcgggcatcgcccgctcggtagaagtgatgcctgtagccgcctggtatccggaagccgttcgtcttctgaaagaaaatccgggattggatgccggactgcatttagtcattaccagtgaatgggaaaatgtaaaatggcgccccctgacgcattgtcccagcctgacggacgagaacggatatttttatccgatgatgggagctaatccggcctatccgggacagtcggttatggaaaacaaatgggatataaaagaggtggagcaagaattccgtgcgcagatagaaatggcactgaagaacattccccaactcagccacatgacagggcacatgctgtccaccggattcacgaaagaagtgaacgaattggtgttgcgactggcaaaggagtacaacctcccttccattgaccgcatggattcacccaaagattaccggttcacctatatcggatatgatggcccgagccggacatcggctgaaaaagaagagagcttcatccgttccctcaataaactggaagccggtaaacggtatctgttcctcgaccatccggcactggataacgaagaaatgagaaccgtctttcatatcggctacgaacaagtagcactcgaccggcagggagtgacagacctcctcaccagcccgcgcgtaaagcaagtcatcgaagataaaggcatcaaactaatttccatcaaccagttgacaaaaggacttccacgtagcactgcctctaaaaaactggagaaagctatggaaaaatacctggatgcagtgcagaaagctaaccaagacctgcacagcatcatgatagtgcaacatggcaacgtgcttgccgaaaagtggacaggtgaagggaaagaagatgagccgcacattctgaactctgtcagtaagacatttaccgcctcggctgtaggactcctcatttcagaaggaaggctaaatctgacggataaagtaatctctttcttcccggataagctacccgcaaacgtcagtgaaaacctaaaagccatgactatccgcgacttactgactatgacttgcggacatgatacagccccgagcgtcaatacccaggctactgaaactcccgccaaggattgggtggagcagttcctcgctcatcccgtagaacataagccgggcactttctttgcttataacagtctcggaacctatatgctttccgccattgtgcagaaagtgaccggagaaaagctagtggattatttatatccacgactgttccgtccactgggcatcgtcaatgtgaagtggcaggaaagcccgcaaggaatcaattgcggcggctggggactatacctcaaaaccgaagaccttgccaagatgggacaactcttcctgcaaaaagggaagtggaatggccggaaagtactgtcggaagaatggattgccgaaacttccgcccgtgccaatggggccaacggacaatatatcctcgtaattcctgaaaaagacgccgttattgccgttacagcacatatcggagacatgcaggttgaactggatctaatctggaaatacctgctcccggcactgtaaacagatgcttcgtctatttaatcttctgtaaatgaccacaagaaaagggaaatgtacaaaacctttttcaccgcaaccttgtagtatatccataaaccattaaaaatatacagttatggatgatttgatttacagaaacaatgcgattgccgaagagaatatcgacccgcatggtcgtccggcaaaggatgaatttgaagaattcagcgaggaggtttccgaacatacggaccttggatacaaagaacagaaagtaaagtccgcaaaggaacgcaagaaacgtctcaaggaaatggacgaaatagtcaaggaagaaataaagtagctacgaaatacaagctacgagctacaagtggctgcgcaattataccgcatggcacttgtagctcgtcgctcgtaactggtagctagtagtttatttgtatcccgcaacttttgctatacgtttcgggatttccgtattatcatacttaccggcaaattccttagaacctgcacctactgcatataccggcacatactctgctgtgtggctgccacttgtccagcctatcatggcaatctggctcatcacttttcttgcggtagcagccagcggttcagttttcgaataaagagtttcttcgaacacaaccttattctttacgaaggattgctcaaattcatcacgcaacatcttctcctgttcccaagtcaaaggcaattctttccagaaacccatcttttctaccaacagagccttggcatcttcccaagttacattatgacctttggctttgcgcaaatccgtgatagcagtagaaagtaaatcctgagactgtttctggttcttcagagccttcaaatgtaattcatacttgcctgtacccaatcccaagccaccggtttcatggtcggcagttactacaatcagagtttctttcggatgttttttataaaactcataagccactttaatggcgttgtccatatcaatcacttcttcgaaaactgtggcagggtcgttactatggcaagcccagtcgatctttccaccttccaccatcaggaagaagcccttgttcttgcctttggtcaggaaagaaacagcgctttctgtgatttcagcgagggtcatatcgccgtctttacggtcaatggaataaggcagacaagaaggattagcaccgtctttctggataagaatcatcttatcagcctgggtggacttaaccttaaagtcatcaatacctttcgcaatggtataaccggcttcctcaatgatcgggaaaatgctcggagcttctttcttatcagcggtagtagtaggcttcagaaaaccaccacctgcatagaagtcaaagttagccttcggtaagtcaagtgctatttcataatacatgctgcggttaggctgatgagcatagaaagcggcaggagtagcatggtccacactgacactggtagttacaccgactttcttcccggctttcttcgctttttcggcaactgattgaatcacattcttctggtcgtccataccgatggcaccattatacgtcttcactccggtagccaatgcagttccggcagcggaagagtccgtaaccgaattagtggcagagaaagtagtggcaacacctacagccggaaactgagtgaacagcaacggcgtcacgccaatgcgtccttcctgttcagccaggtacatttccgtagcgttcacttggtttactcccattccatcaccgatgaaatagaatacatactttgcctgttgcgcatacgtcgcgcctgtcaacaggacaaagagcaatacatacatgaatcgtttcataagttggtatatttaaagtagtttgaataaatgtcgctttctcttaaatgacaaacaaagataaggaatttaccccagtgaccggaacagatattgttaaaaaaataaagccggaaggcaatccgcattgcttccggcattattgttacatcgcgattgcgatgctatctactttaaaaggattatttattgttcaggatagccattgtatccgaagcaatcatcagttcttcatcagtcgggattactacaactttcaccttagaatcttcagcagaaatcactgcttcttcgccacgaatcttgttcttctccagatccagcttcacgcccatgtattccaaaccttcgcatgcaccggaacgacaagaagcctggttttcgcctacaccaccggtaaatacgataatgtctacgccacccaaagcagcagcataagcgccgatatactttttaatacggtagaaatacatcttttcggtcaggtcagccattttattgttaccggcagcaacggcagcctccaattcacgcatgtcactggatacgccgaagataccctttacaccgctcttcttattcagcaagtcagatacaccggcagcagtcaggttctctttttccatgatgaaagtcacagcaccggcatcaatgtcaccactacgggtacccatcatcagaccttccagcggagtcaatcccatactggtatctatgcttttaccatccttaacagcagtgatagaaccaccgttaccaatgtggcaagtgataatcttctttccttccggactcactcccagatactcacacacgcgttgtgatacgtaacggtgagaagttccgtggaaaccgtaacgacgtacaccatatttcttgtacaattcgtaaggaatggcatagaggtaagcatagtccggcatagtttgatggaacgctgtatcgaatacaccgatctgcggtacattcggcaatatggcagagatggcgtttacgcctttcaggttagcaggattgtgaagcggagccaagtcgttgcaagccgtgaaagcatccaagacttcctgtgtcagcaacacagattcgctgaacttctcaccaccatgcaccatacggtgacctactgcgttgatttcattcaaagatttgatagcgccaaattcagggctggtcagtgtatccagaataaattccacacctacggtatgttcgggaatatctttctccagaactttcttctcaccgttaggtaaagtaaacttcaggaaagagccttgaaggcctattttttcaataccaccctgtgcgatcacttctttatgatccatatcaaacaacttgtatttgatggacgaactaccgcagttcaatactaagactttcattttatatattcagatttaatggttatttttgattctttgctgcaatagcctggttggcagtaattgcaatcatgcgatacacatcttcgatggagcaaccgcgtgacaggtcgttcaccggacgggcaataccctgcaaaataggacctaccgcatctgcatgacctaaacgctgtaccaatttataagaaatattacctacttcaaggctcggaaccaccaatacattcgcatttcctgcaattgcagaacccggagctttgctggcacctacttccggaaccaatgcggcatcggcctgcaattcaccatcgagagccaagtcgggatccatctcatgtgcaatctttacagcctcaatcactttatccacaacttcgtgcttagcagagcctttggttgagaagctgagcattgccactttcggttccatgcctactacagacttagctgtgcgagctgtacaaacagcaatctgagccaactgttctgcatcgggcaccggagtcacagctacatcccccattaccaaaataccattctttccatattcaggagcatgcgtcaacagcaacattgcaccggatacacaagtaatgcccggagttgtcttaatgatttgcaatgccggacgaagtacatcgcctgtggtgttgcgtgcacctgccaactgaccgtcagcatcgccattcttaataatcagacagcccagatagagcggattaactaccaacttacgagcttcttcgatagtcatgccttttttcttgcgaagttcacaaagcaattgcgcatactcctctttcttcggatgattctccggatcgatgattgtagccttgctgatgtttccaagtccccattctgttgcacaagcattaatttcatccggattacccagaagaatcaagtcagcaactccgtctgtcaaaatttgattggcagctttcaaggtgcgttcttccgttccttcaggaagaacaatacgttggcggtcggctttcgcacgctcaacgatttcattaattaatctctgcatatatataaattgtgtataaaaatccagtagacgtgttattcacgccgcaaaagtacacaattttgcaatatcaacattgcaattcggggcatttttatgccccgaactacaattattataatatttaacactaacggatgatttctggagccacttgtttgtactggtccatgcaggcaccgatgggtgcaccgatataggtgggatcgcaaatcagatatttactgccgtcatccagtaccacatagtctcccggaatgtcctcggtaaagcggacagccgaagcaatatggttaggataatccagcaagatagtgtccagaccaagcaaatctctcactaaagtagagtaaagcattgcgcggtcttcgcagtcacaataaggataatagaaagtttcgtccgggaagtttggcttttcaaagccgaattgttccccgtccgtcatgtactcaaaagcagtctgcacaaagttgagcagaatattggcagcctctttctgcgatttacccgcaatagcggttttcagttgcggataaagggaagcacgcaattcctcactcatcggtgttttgtagtgaatcacgacatcacactgggggtaatcgtagtaaaagtctatcagattcttattcacttgtgtctgtactttcacagcacctgtagaagaagtcagactcttttcatgttcattcatggagaaagcgggaacaccctctatattcaggcataccagattcttagcattggcaaagtcctgacgataggtataaatccccatcgaacctcccggtgtcggttcaaacacataatacttattaccgcttatagtaagataaggtgtaccgtaaatagtgccggcaggtgcaaccatcaacttaaactggtcgtcaatcttggcaaggcgtaccttatacccggatttattcagaagaaacatctgcaagaatacaatattattcgtatttccggcaccgtatagttgtgttccaatctgtttcgtaaacaacagataagcccagtcgctcaggttcttctccttcttgatggtcatacaatccttcaccatctgctcgtaatccctcttacaaatagctttccaggcatccgccacatcggactcacgattacctttcagagaaagatcgtccgcagcttccagagcaacttcaaaagaagtaccataaaattctacaggagtgcgatacaccgtactccccggttttacaggaggtacttcaaccaacacaggagtataaggcttacccggcacatatacgcccggagccggtttatcctcaatggcaggcaggtcaggacgtttcacatccaccggaaccttctctcccatactgggcacaggagcatccggcaccttcggagcggcaggtttaatattcaccggtggcatcgtcggctttgtcttgtcaaactctaccggtttgggtggttcgggacgttcaggagccggaatcgcagcaaatgcttcatacttctgccacgtttcccgcaagaaggtttcaaactccgcgtccgccttattcttgaaatcttcaaactcttgttgttgctgcttcgcgaaatcgtcgaattctttctcaatgtcttgcgcacacaagtgtgccgccgacaaaaagaaggcaactaaagcagcagaaaaacacttcatcttattcatctgtataatagatttagagaagttaaaataaaaacatgtattacttgataagtatcatgtcgtagaaggcacaacgcttgtcattaggaatggagtatacccatttcaacacattctgataagtcacttcgtccgtaaaaggaatgttttccttggtagccaccatcatcatgttgattttctcactctcttttccttgcttttccatgcggtagtccaccgcattgctgaaaggaatactgtactccttttcggcctgcaacaaggtgttgggctcgtaagtattagggtagagcaatgcaccgccggtactgtcaaaccagaaaaacttcagataggagtccgtgccgtgcactttcaacgtacaggtaaacacatctccttctttatataaattcgctacgcccttcacttccagcgcatacgacttatccactttttcttctttctgcacaacggcatcgatagttaccactttatacaggctacgggtattcgtatcccacacttcctctactttcttgttggtaacattcaccattcccccaatcgcaagtacgttcatctgtgaatatgcctcgtgaaactctgtgccgctctcctgggaaatctgtccgaatacggaccacacattctccatgacaccggctttgcgcaaggcttctttcttcgcttccataaaggcgcgttcttccgcttctttcagcgtgatctcctcactcacttgccagcgcccctgcgcacccttcacctttacggaattctgggcgtgcagcggagcagctattgtacatatcacaaggaatatccacccaatcaggttgttcctattcattcaccatctgttttttttaagaaaatggaattaattaatagcccagtttatccaactgtttagccagttcttctgacttggcagccagttctttacggatagcctgaacagcagcctggttagcagattgcatgctgtaaccaatggtaaccattacttccacgttcttattaggtaaagttttgtatacttctaccaaaggaatcgtacgacctagtgtagcagaaattacactcttgctggaagcaactacgcttgacaaactggcagcttcttcctgtcccatgtcgtcattagcaactttcgcttcgatcaattgagaaactttggtctgaatctgacctgccaggtctatttttgcagcattggtagcttgcaaagcagcagccgactgatttccacctaccgctctggaagaagcgatgtaccaatacgggttaccttcagtatccaattccgcttgtttttcccaagctgtttccagttgcttggccagaggcagttttcctaccggagtcttaaaaccttctttttccaatttcttggcttctttgcgagcttctttgatagctttcttctgcaattccttatccaatactttttcctgctttttcaggtctttataagccttaccagtagctttttcctgtgcattcacatttacacaaaacatcataacaaacgctactaaagcgctaatgaataaactctttttcatattcttcctgtttaaaagattaatatttctcttgaaactttatatacaatcgttatcgcaaaaataggcaaatatttctaataatatccatatcacgtcttttttttcattgccctaaaacaaatggaaataaatatcacgggaaacagtgacagccaaactacaaaatgcctaactttgcagcgttttcagtaaacaattcagcttctgattagttattaggagagtttcagcgaagtgacagttcctttaattcctttcagccaaaggaagttgagtttaataataataaataggtaatagtagtatgattcgtcaatgcgccatccttttcggatgcctggctttgggtgaattggttgtttttcttacggatatcaagcttccgtccagcatcgtaggtatgctgttgctcaccctttttctgaagttgggttggattaaactgcaatgggtgcagggattgtccgacttcctggttgctaatttgggatttttctttgtccctcccggtgtagcccttatgctttattttgacattatcgctgctcagttctggccgatagtcatagcttctttagttagcaccctgctggttttaatcgttacagggtgggttcatcaattagcacgcaaaatcaaatgagttacttagacaacgaattcttcttgttagccgtcaccttcggcgtgtttttcttttcaaaactgttgcaaaagaaaactggtattttattacttaatcccattttactcactatcgccatcctgattatctttctgaaaatggcacatatcagttacgaaacctataacaaaggcggatatctcattgaattctggctgaaaccggcagtagtagctcttggagtacctctatatttacagttggaggccataaaaaagcaattggtccctatcctgctttcacaactggcgggttgcatcatcggagtagtttccgtagtggtgattgccaaactgatgggagcaccacaagagataatctattcattggccccaaaatccgtcactactcccattgctatggaagtggcagatacattagggggtattccggcactgacggctgccgtagtggtttgcgtcggcttgttgggtagtatcatcggaataaagaccctaaaactaacgcgtatcaagagccccattgcccaaggattatccctgggagctgccgcccatgctgtggggacttccacagctatggatatcagcagtaaatacggggcctacgccagtctcggacttacgctgaatggcatcttcaccgccctacttacgccaactattttacgattattggggttgctataacaatttctctttatctttgttattctttatattgaaactaacgaaaacgacgatatgatatcatttaaagacattgaacttaaagacaaagaactcattacatcttatacacagcagagtccccgacgtaactgtgacctttcattctctaacctctgtagctggcgtttcctttacgacactcagtttgccgtgcaggacggcttcctgatactgaaattctgggcaggggagaaactggtatatatgatgcccgttggaagtggagatttaaagaaagtactggaagacatgatagaagatgccaatctggaaggtgaacgtttctgtatgctcggagtatgtgccggcatgcgggcggacttggaagctattatgcctgacaaatttcatttcgaagcggacagggattatgccgactacctatatcttcggactgaccttgccacattggccggtaagaaattccaagctaaacgaaaccacctcaataaattccgtcggacctataccaattatgaatatgttcctctcacttccgaccgtatacaggaatgtctcgatctggaagccgaatggtgcaaagtgaacaactgcgaccagcacgaaggtacgggtaacgaacgccgtgcccttatctatgcgctgcataacttcgatgcccttggtctgacgggaggtattcttcatgtagatggtaaaattgtagctttcactttcggtatgcccatcaaccaggatactttcggcgtgcatgtagaaaaagcagataccacaattgatggtgcctacaccatgataaattatgaatttgccaatcatattcccgaacaatatacttatatcaaccgggaagaagatttgggtatcgaaggactacgcaaagccaaactgtcctaccagccggtgattattctggaaaaatatatggcttgcctgaaagatatccctgtagatccggtgaaatggtaagattctttaaagcagttaatagcaagtaataaatagttaataaagatagtaagcatttgaataggagatagaaataatgcgcgaaaaggtaaagaagctatggaagctttgttttaatgataatgacgagtttgtggatatgtactttaaccttcgttacaacagcgaagtgaatgttgccatcgaaagtggtgatgaagtcattgccgccttacagatgcttccctatccgatcacttttcatggcaatagcgtaccgactgcatatatttcgggcgcatgcactcaccccgactaccgtagccagggcgttatgcgagaattactatctcaggcattcggacgtatgtatcgtaataatatcgcacttactacccttattcctgccgaaccttggctatttggctattacgcacgtgtaggttacgcaacggccttccgttacggtaaacgcacatttcatttaccaaccagtgaaacggatacttcttctctcacttcatctgccaaaacaggctggtgttttcaggcttacacagactatgatgaagatgtctatcaatatatgaatcgtaaaatgcaggaacgcccttgctgtctgcaacatacaaaagctgacttccacgtcatactggccgacctcaacctaagtcgcggatatattttcactctttcggatgaatttggaatcgccgctcttgccattgtatatcccgatgaagaagcttctaaactgtttataaatgaattgtttgcagatactcccgaagcagaacgtttgctactcacccgcatttgccaagacatgcagactaaaagcctcgacatcatcatgccctctgttaaagatcaatccgctttcgatctgggcatgatacgcatcattcaggccaaacctgtactgcaactttatgcagccgcacatcctgaagaggaaatgaacattgacctcattgataatgaactttcagccaataacggttattattatctgaataaagggaaatgtatgtatagccacagacgacttccgggtgcacacgagcgactaaccatcgggcaattaacagaaaaaatatttgcttcggaacgagcatatatgagtttaatgctaaactaagcgaataccggcctaacttagatctatttagttaggctgcctgtattcgccaggagtacaaccacttattcttttaaataacaaactgaaatatctggaagaagaaaatcccagcccatttgcaatctgaagaattgatttatcagtctttgtcaaccagttcttcgcaatctctatacgtttaaactgcacatattcatgaaaggtctttcctgtatcatgtttcagcaaatccacgaaataagaagaagacattttaagttgttctgcacaatggctggctgtaggtagtcctttcatctgtacctgtccggcaaaaaaacagccatccactatttgttctaccttcttcagaatattccggttctcttcattcctggtaataaattgtctgtcataaaagcgtatacagtaatccagtagcagctctatagaccttgaaaccagaatcctgctatgtcggtctatcgccctgtgaagttcatccccaataatctccagacatctcataaaaactttcttttcacgctgcgagatatgcaaagcctctgttttatgataagtaaagaaagtatagtcctgaatatgcattccgagagaagtccccgtgatcaggtccggatgaaataccagcagccaacctttagatatctgcttctggttgtactcctcgatatcaaccgtctcaccgggagatgagaatataagagtaccatctgaataatcacagcatttccgcccataagcataacattcacaggtatattccttcaggagaatggaataaaaaccgagtttaagcggcagacattgctcgctgtttgtcttagaaagatcgattatgctcaccagaggatgcagtgtcgcttctcccaagacttcattacactggcatacggtctctatatgtatcgctttctccataaagttctaaatgcttgcaacaaaccgatctatcaggcttgtacttttctatattcgttcggagtgcatcccacattcttcttgaacatccggctaaaatgctgtgaatactgaaatcccagttcgtaagcaatctggctgacagatttgtttgtccccaatatccattccttagccagatccattatcttattttgaatatattcctgtgcactcttcccagtttctttcttaatcaggtcaccaaaatagttgggcgataaacagattctatcggcaaagtatttcaccgttggcaaaccttccattcgcaactgttcattctggaaatactcatcaatcagttcttcaaacttaaccagcacatccttattagcttccacgcgagtagtaaactgcctttcatagaagcgcatgcaataatcgagcaatagttcgatatttttagatatcaacaacttactatgcttatcaatgccatgttccagctctatctggattttctccatacagtccagaatgattctcttctcctgctcggaaagatgaagggcttcagtagaatcatacgaaaagaatgaataatgtttgatttcacgtcctaaagaagttccccggattaagtcaggatggaaaagcacgccatgagcagccggttttgttccggcagtcagttcaatgccggttacttgcccgggagcaaaaccaatcactgtaccttcgcggtagtcatacaacttacgtccgtaacggatgtctccacacttcgtatctttcaggaaaagactatatataccataattaagacggaaactcgtcggccaggtttcagctttagacaaatcgacgacgctcaccaagggatgcaaagtttccagtccgaatagcttattatactgatcgacagtatcaatttttatcacttcatccataaggttttctttttaatccgtttcaaagataaatattccaactgaataatccttatcgactgaatcagaaaccgtaatcgaggtacaaacatccgtaatttgtgtacagactatggctcccaccttacccttggagttataagtcaaggaaacttaaatcactaaccactaaaccggcatctcttaagttcctgtctgaggaagattaacgagctttcttgcatctatttattctttccaccgcggagaaagtttctttccatcgcggggaaagtttctttccaccgtggtggaaagataaaacctccgcggtggaaagaataaacagatgcaatacttcttcttaacggtagcagggaaaagaaataaaagtggcggcttggcagcttaactcctattcctttcttattctaaactaatcccaccaaccggtaaaaacagtaattcagttacttttatctgtaatctgtatacaacgtttacggagtatcttcggtaattttgcattatgaatgaagcgaatataaaatccaataaatattgatttaataaagaagtaatatgaaaaagctattcttatttccagtaatgttattgtttgcccttacaataacggcatgcagcaattctcccaatggttttgaagaaccggaaactgaacaaccggaaactcccggaaatgatggtgacgaagataataaaccagaagagaatagtatgaagataaagataaccgtaggtaaccgtgaagttaccgcaacgatgaaagacaatgctacggctcgtgatttcctgtcacgtctgcctatagaagttactatgaatgactatgccggagctgaaaagatattttatccggaaccagcattcagcacagaaggtgctcccaagggacatactccatcccgtggagatattgacctgtatgctccctggggaaacgtcgctctcttttataaaagtggaagtcatagcagcgaactgatacatttgggacgcatcgacggaaacggaatagaagcttttgacgtagcaggcaatgtagtcgtaaagattgaaagacaatagaatctatcaccataaaaacaaaacattatgaatctgaaaagaataatcattgccataacggttgttttaatcggtacaggcaatataaacgcacaagatatgaaaacagaagttccaaaaatcagtgacttcccgataggggaagagaatactggctacgcacagtatttcacaggtaaatcctggctggcacctttgactaccagcaaagaattaaatgtaccgatgtccaacgttacgtttgagcccggttgccgcaataactggcacagccacacaggcggacaactactgattgccgtaggtggtgtgggctattatcaggaacgcggaaaggctgcacgccgcctgttgcccggtgatatagtagaaatcgctcccaacgtagaacattggcacggtgccgcacccgacagttggttctcacaccttgccatagcgtgcaatccgcaaacgaatcagaacacctggcttgaggtggtgaatgatgaagaatacgcggaagctgtaaaagacagaaacagtaagaatagaaaggatgagaatagaattgaattatgcaaagagaactacacccaactattcggtggagaagctttgaccggaggaggaacagatccggaaatgatggatatacttcagaaatatatctttggagaagtgtttcgcacaggtgatctggatataaaaacccgtgagatgattacttgcgtatcattagccgccatgcagcaactgccacagcttaaaagtcacgccggagctgcactaaacacaggggtaactcctatagaactgcgcgaggctatctatcagtgcgctcccattatcggtttccccaaagtattgaatgcattgggcgcaataaactccacattcacggaaagaggtatcaagttacctttggaaaaacaggagacagtgacagaagaagatcgcttggagaaaggtcttgctattcaaaaaccgctttacggagaggctatgaaggaattactgaaagacgttccgggcggcatgggagccgacgtagcacgtttcctgactgaagttcatttcggagatttccaaacccgaagcggactgaatacccaaacgcgtgaattattgaccttctgcgtactgactgtaattggtgcagagccccaactacaatcacatctgcaagccaatctgaaagtaggtaacagtaaggaaacactgactgctgccgtcatacaatgtatgccttatatcggttttccggctgcaataaaggtactggatattataaaaaaagcatgacactttcttccataaatcctttattgacacaaccgttttagcaaatcttcatgatccgggtaaagtttcgataaacgattgaacgtacccaactcaaaatcatcgaaggtaaaaccgggagcaacggcacaactgaccaatgcatatccgaaatgcgaaggcaattcagcagcaaaccaacatccgggctcaatgacaacctgctgttcgcccgaaaagtcagcagtcatcaagtgagtaactaatctaccatcgggatggatcacatgtagcatcaggggatatcccgcatggtagtaccacacctcaggagaagtcagtctgtggaaagctgatttatcttcattttccaacaggtaataaatggaagtcatggctgatttatcgttatcaaccagcttttcggaacgaaatatttctttgtagtatccaccctcaggatgacgactcatattcagatggtttatccagtcaattgctttcatacctatattattattaatcaatcccgctcttccgtgataaacatcatagaaaagcgggatttcttttatttagaatctcttaaagtccactgaagtcaactccttcaaacactaatgaaggaaccagccagctacgatccgtacgagcatcattaccgatagccgccaacgagttccacagcgtcaggaagtttccggtaacattcatttcattgacaggttgcgtcaatttaccgttctctatgaggaatccttcgatgccgtaagagaaatcacctgtgttgctattgctattaccaccattcaaaccggtaacaaggataccattcgctacatcagcaattaaaccattaagatctttatcacccggagtaagtaccagacgtgacggaccgctaatagtaggagctacacccatcttcttggcattataagtatcaaagaagtaagtcttcaacacaccattctcaaagatcggacgatgttccgttgccacaccttcgttgtcgaaataacgcgaaccgttagcccctatcacgtgcggatcatccattacagtcaacttatccgagaatactttctgatctagtttatcaatcaggaaagagttcttttgctgcaaagaggagccataaagagcactcaatacaggactcagcatacgtcccgaatttatcggatcaaccaccattgtatatttaccagacttagctttcttctgtcccaatttacgcaatacacgttccagtgctactgaaccgatatctgttttaggcaatttatcatagaacagggagcttccataccaataatcagacggacgggcttcaccctcacctttaatggctacactggcagaaactgaataccaggttgatttggattcaccttcaaaaccattactcattagacggtaagaagcattctcaccatcactgtatgaagtctctactgagatgatacgatcattcttacccataacttctccagcggcagcacgggccaaagctactttatcatccggattgataccaaagatcttatcatcgaacatctgcaaatcgggtttgccacctgtataatagcgggcgggatctgccaatacacggaattcatccggagccagataacgggtagactcgataccattcttgataaatgtttcaagttctttcttatccaaacggttggtagaataattaccgtaacgcccatctacatatacattaattcccatgccactctcagaagcctgttgcagacgatccatcttagcatcacgcaattcaaaagaagtgtttgaattggcatacaatacaactttggctgcctggcaaccattcttcaaagcgaaatccatcgcccattgagccagttttttattattatctgttatcatcagttttctcctcctacagttaatttacttactaaagccgaaggcataccgcaggtcaccggacaagactgtccgtccttaccgcatgtccacgtaccgttatcgatctgatcattgcttgccaccatcgtaatgtctgccaatgctttgggtccattaccgataatgttgatatctttgataggttgcgtcagcttaccgtcttcaatcatataaccgaattttacgaagaacgtaaagtcacctgcaccaatctgcacctgtccgttggtgaactgctgtgcatagataccgttctttacagtagagatgatatcttcttccttcatatctccggcttccatatacgtggcacgcatacgaggaataggtacattacggaaagtatcgcgacgtccgtttccggtaggagccacaccataatgtttagaactgatacggtcgtgcagataactggtcaacacaccatccttcacgatataagtcttctgtccttctataccttcatcatcgaagtttacagaaccacgattgaaaggaatcgtaccgtcatctaccacactgatatgttcattacatactttcttgttcaactgatcggcaaagatagaaacatttttacggttgaaatcagcttcaaacgcatgtccgatagcttcgtgcaacaagatacccgaaccaccggatgccatcaccacagggagttcaccacctttaggtttaatggctttaaacatgattgctgtattatctacaacttcgcgagctatcacttcgataatatcatccgtcataaactcaaatcctttacgataggaacgagtggcgtagttattttccatacgtccgttctcttccataatacagaaagccatataggataccatcggacggtaatcatagtaagtcacaccttctgaattacagaacagcacatgtgttgtgttgtcgctcagagaagcctgtaccttacgtacacgattgtccaacgcaaatactttatcattcagtttttgcagataaggcattttctctttcaggctcacctcttcccaaggagtaactacagagtaacgatctctttcaatcgtcttctccttaaatgcgacaggctttccagccttaccggaagaagcaatacgggcagccgtacgtgcggcacgcaacatttcttccaacgtcacaccttccacataagcataaccgctttggtcaccggctaatacacggacccccataccgaagtcaatatttgaactgcaattgttcactttaccgtccatcagagctacagcattattgaaagagtgctcaaaataaaggtccgcataatccccacctttttcaagcgcaacagtcaataccttcttcaggtctgcctccgttacaccgaaatgcttcatagccgcagctacagcagatttgttatccgtgcctcccaaagctccccgtaccgtatcaggtaaggcaagcgacggagcagccagcgaacctaataccgccagactacccatccgtaagaaattccgtctatccatctttttattctttaagattgctaataatcaagttatatcctttgtataaaatatgtttccagtatataagacgcagtttaatatcattttgtcacaactgaaactaattttctttcgtcaacaggctttctaattcttccgcattcaagcgcaaatggaattgtcccttataagctacggaaatggaaccggtttcttcggaaacgataatagccaatgcatcggattcctgagagatacccatcgccgcacgatgtcgcagtcccagttccttaggtatatccagattgtgtgataccggcaaaatacatcctgccgccttgatccttcctttgctgatcaccattgcaccgtcatgcaaaggactattcttgaaaaaaatattctctatcaaacgttggttgatatcagcattgataacttcacccgtgcgtaccacgtcgtctaacgggaaattatgctcaataacaatcaaagctcctactttctgtttacccatgctgatacatgccatgaccaccggcatgatttcatcatgctgcatattctccttcttattcccggtgaagaagcgtaccaatgcactggcatgctgatgtgaaccaagcgtcagtaagaaacgccgtatctcatcctgaaaaaggatgataagtgctaccacacccacgctcaccaacttgtcaaagatagaaccgagcaacttcatctccaatacctgcgacactaccaaccagatcaatatgaatatcaggatacccgtaaacacattgatggaaccggaagctttcatcagcttatacgtatagtaaagcagaaatgcaaccagcaaaacatcgataatatcttttactccaatatcaaaaaacataagatttatgatttatgaattatgatttataagctaagtgactttccttgatcacttatcattctatcaccttatcactattttttcgcatagcctccacaatcttcaccgtttctacggcttcgcgtacatcatgtacccggagaatatctgcccctttcagcagacaaatggtatcgagtaccgttgttccgttcaatgcatcctgcggagtattccccaacaggcgatagatcatggatttgcgggatacacctaccaataagggcaactcaaaaacacgaaactcttcaagatgcgccagaagttcatagttatgttctaccgtcttaccgaaaccgaaaccaggatcaagaataatgtccttcatacccagatcacgtaattgctgcaccttctgtgcaaaatagaagaagacctctttcaaaagattgtcatagtgcggatgtttctgcatattctgtggggttccttgcatatgcatcataatataaggcacattcagttcggccactgtacgaaacatatccgcatccatctctccagcagcaatatcattgatgattgccactccatattcttccacacacatccgtgccacatctgccctaaaagtatcaacagaaataacagttccggggtgtgtcttacgcaagatttccaatcccatacgcaaacgttccatttcttcatgaggagaaacattctccgcattcggtcgggaagaatatgcaccgatatctataattccagcaccttcatccaagatctgctgtgcccgcgcagttatctcagcctcagtctgcatacgcgaaccggcatagaaagaatcaggagtaatatttaatattcccatgacgcagggaacggacaggtcgagcaaagaaccgttgacgttaatatatttagaggataatgtttccatggataatcctttttcgtttatactttgcaaatgtaaccaaaaaagattatcgcaaatacattaaatacaaaaaaacaagttaactttgctcaggattaacaaccaatagatagaagtagtaaactatggaagcatgcagaacgactggactggtctctctttttctgctacttttctggttgcttattcccggacatatccacgggcaacagacaagcgaacaagaaaagtatcatgttgatagtacattatttgtatattatcaacattgtaagacagaaataaaatctccttctgtcatgcagatgctcgatacgttattccttatggccaaagaaaaaggagatttgcgtatgcaggcagtcgccatatccagcaaaacagatcatttctattttggtccgtcctttgaaggccaagaagacagcctaatattgtataccaatgccatcaaagactttgcccggaaaaccaatcaacctcaatattattattttgcctgggccaaccgcctcataacttactacacaaaacagaagaaattaaacctggccctctatgaggccaacaagatgcaacaagagtcggaaagccgggaagaaatcgatggcatgcagaattgctatcaagcactgttgcgcatctatcagagtaaagaactctataaacaagccactgtatatgcgcaaaaactaatagacctcacattaaaatataatctgaataagtataatctaacaaataaatatcttgaattaagtaactgctacctccgcaccaatgaaccgaaaaaggcttgggaagctcttgaagaaagtaaattgtatataggtaatgaactaaaccaaggagcttatctatgcggactactccgttattacattcacaccaaagatatgatcaaagcccggaaaacgctaaaagaaaccacacaacttttcagcaagaataccgaactgcgtattaagcgtgctactaatctactggaaattgaaaccaattactacatagaaaccggcgaatatgataaagccctgggggtattccagcaagcctttgaaaaactgagccaaaacggatttatcaccccaacactataccgcacacgtggggctatctatactgctaaaaaggactatcagaaagcgattgagagttatgaaaaagcttttgaactcagtgattcactgaatagtgcccaggaagacatagctgtaggagagttcgcaaccattttgggaatggaacatcttaatttagagaacaaggagttaatacaaaaaaatcaggaaatacaattagaaacacgccggcatatcatcattctattatgtatcatagtagtaattgtcggtattatgttttttcgcgaaacccgactgaataaagttctgcggcgtgccaaagatgcagaacagagcgccagccgcatgaaaacagaattcatacagaatatgagccatgagatacgtaccccactcaattccatagttggtttctcgcaaatactcagtagcaagatttccgaagaagacgaagagtcgaaagagtatacaactatcatcgaacaaggtagtaatcatctgcttcaattagtagacgacgtattggaattatccagtcttgatagtggcactaccatccctatcgacacaaagagtgagctaaatgagctttgtctacaatggatggaacgcgcaaaacgcctggttaaacccggagtcgttctttcttatcaacctgaacagaacgaactctatctgcatacaaaccctgcacgtcttgaacaggtagtattacaattactgcacaacgcagcaaaatttacagaagaaggtggtattacacttagctggcgcattcttcccaaacaaaagcaaatcatgatttgcatcactgacaccggcattggcattccccaagacaaacaagattttgtgttcgaacgattcgctaagttagatacattttcaaaaggtaccggattagggcttgccctcagccgtctcattatggaaagaatgggtggtaatcttgtacttgatgcccaatatacggatgggtgtcgctttatgctgactttacctatataatagtttccagaaagttccataaaaactttttattccaacaaagaaaggctaaatttgcaaaaagagttttaccacattagtaatgaacacaaaaaagccgttttttcctattttcatcattttgtattgtctcggcactttatacagttctccaatgcaaggacagcaaagagacacacaaaaagaatacaacgtagatagcacattatatgcttactatatgcgttgcaaagccgaagtgagttctcctatcaccgtgcaaatgtcagatacacttttccttatggccgaagaaaaaggagaccaacgcatgcaggccgtggcattatgcaataaactggatttctattattaccaaaatagccaactggacagcatcagtcattatgtagaagtaattaaagactttgcaaagaaaaccaatcagcctaaatattactattttgtctggagtaaacgactgatcaattactacatcaagcaataccagtataacacagccttatacgaggctaacaaaatgatgaaagaggcagaacaagagaaatacatgaatggcatagccaatgcctacaatgtcttaggttctatctaccatctcaaaagattattcaatctgtctatcgacaacaaaaagaaggaaatagaaatcattctacaatacgatctggataagtacaatctatccatctcctattcaggattaacaaacctttattgcgaattaggggaagcaaataaagcacttgagaatctcaacaaaagcgcctcttgcctttatagtagcacgcaagaattctactatcatgtgcgtgcagcccaatattacctctttattgaggactattcccaatcctggaaaagtctgcaaaaagccaaagaattatatctctcaaagaaagaggtacagaaaaacgtagaagaatattatgaaatcctacaaaaatactacacaaaaacaaagcaattcaaaaaagcattagaagtccaggattatataattgctacattcaacccgaacggaaggtacaaagtagaagctatgcgtagacgcgcatctatatattatgaaatgggggacaattccaaatcggcacaatactatcaggaatattacgctttaaatgattcaattcagataacaaatgaagatattgccgcaggagaatttgccgccatgctgggagtagaacgcctgaatctcgaaaaaagcgagctgcaacaacaaatacaacagcgcgatctggtgaacaaacaacgtatcattattttcctaatcatcctgttgagccttggattcattattttctatcgcgagcatctgctcaacagccgattacgcatctctcagaaacagcttagcgaaaagaacaaagaactgattcgttcacaagtagaactgaaacaggctaaagaacaagcggaagaaggtagccgcatgaaatcagaattcatacagaatatgagtcatgaaatacgcacaccactcaattccatcgtaggtttctcacaaatacttagcagctactacggtgacaatgaggacaccaaggagtacgcccatatcattgaacaaaatagcactaacctgctgcaactgatcaatgatgttctcgacctttcttatctggatggagaacaaaacatccctgcggaaaccattgcagacattacaggtgtttgtcaaacttgcatagatcagacatattcctatctgaaacctaatgtgcaactcatatttactcccgaacgggaaaatttctccatgcagactaatcccgaacgcatttcacaggttctaatgagtcttttgcaaaatgcagcaaagttcacaacacatggcagtatttctctttcctatcacattcgtgaagaagaaaagatgattctttttagcgtaaccgatacaggtataggcatcccgatagagaaacaagaatctgtcttcgaacgtttcaacaaactggatacgtttatgcccggcaccggattaggtttatccattagtcgcctgattgcagagaagatgggaggtagcctcaccattgattcaacttataccacaggttcccgttttattctgattttgcctttgaaagaataaaaacattttcattgtaaatgtatcactgtagcggagaatacctatctttgcaacgtttttatacaacagaaaataacaacgtttcaaaaaggagatagttatggatatcaccgccctatacaagatatttctggaatgtaccagtgtaactacggacagccgcaactgccctgaaggttctttattcatcgcactaaaaggtgacaatttcaatggaaatgcttttgcagccaaagcgttagaatcgggaagtgcctatgttataatagatgaagccgaatatgcactcgccggagattcacactacatattagtaaacaactgtctgcataccttacaggaactagccaactatcaccgccgtcaaataggtacacgtattatcggcatcacggggactaatggaaaaacaactaccaaagaactaatggccgctgttctttctaaaaaatacaatgtactttatacacaaggaaatctgaataatcatatcggtgttccccttactttactacgactaagagcagagcacgatctcggcatcatagaaatgggagccagccacccgggtgacatcaaagaattagtggacattaccgaaccggaatacggaatcatcacgaatgtaggaaaagcacatctggagggtttcggttctttcgaaggggtcatcaagactaaaggcgaactgtatgactatcttcgcgaacgtaaaaactctactatcttcatccaccacgataatctatatctgaggaatatggcttggggattgaacctgatttcttatggaagtgcggatgaattatacgtcaatggacacgttacgggcaattctccctatctgacttttgaatggagagcaggcaaagacggtgaatctcatgaagtaaaaacacagctaatcggtgaatataattttgccaatgcacttgctgccgttactatcggtcacttctttgaggtagtaccggagaaaattgatgcagcactacgagaatatgccccgcagaacaaccgttcacaactaaaacagacagcagacaatacactgattatcgatgcatacaatgctaatccaaccagtatgcaagcctcaatcagcaacttccgtaatatggaagttgaaaataaaatgctaatattgggggatatgagggaattgggaaaggatggtccggaagaacatcaaaaaattgtagacttcctgacagaatgtggtttcaaggatgtaatgctggtaggagagcaattcgccgccgcaaagcataacttcccgacttatccgaatgccccggcagtcatcgaagttttacagaaaagcaaacctcatggaaaaacgatcctgatcaaagggtcgaacggaattaaactgagtacggtggttgattatttatagtcaatcaccattattgtttctttgccattcgcggacgtaatacaaaatatcctatcagcgaagcaatcagcgctcctgttgtatttgcagcaaagtccagccaatcgcctccacgataagtagtgcagtattcctgcaacaattctaccattccactaaataataccggacagacaaacgctcctacccatgcatgccacaatggagaatctcctttttgatgcgcccgcaggaactccagccacaacataccagacatccctaaatacatacaaacatgtacaattttatcaatattaggaatattgctcaaatcggtggtaggcggtttaaagaacgacaaatagattaccgtcagtataatcagtaatgataccggatatttcttaatatagtatagcatatctcaatttatgaacgatttgtgcgcaaaagtacagaacattttctatatttgcatgttctagtagagaataataacgaaatgaaagaaaaatctacttttttatgactaaaaatgacagagccaattttgggagcaaattaggtgtcatacttgcttcggcaggttccgcggttggtctgggtaacatctggcgatttccctatgagacaggtaatcacggcggtgctgcgtttattctcatctacttagcatgtgtacttatattgggaattcctatcatggtatccgagtttcttatcggacgtcattcacgcgccaacactgccggtgcttatcagaaactggcaccgggtacgcactggcgttgggtaggtcgtatgggagtattggcaggttttctgatcttgagctactattccgtagtggctggctggacactggaattcattggtgaagctgttaccgataactttgccggaaaaacagcagccgattatattaatacatttaattccttctcttctaatccctggcgccccgttatttggctggtactctttcttcttgccacccacttcatcatcgtgaaaggggtggaaaaaggtattgaaaagtctgccaaaattatgatgccgatgttgtttattctgttaatcatactggcaggttgttccattgcattaccaggctctggtgccggtctggaatttcttctaaaaccggaatgggataaggtaactaccaacgtattcctaagtgccatgggacaggccttcttctccctgagtctgggaatgggatgcctttgcacctatgcatcgtatttcaaaaaagacacgaatctgactaaaactgctttcagtgtcagtattatcgatacatttgtagctatattggcaggacttattatctttcctgctgcattttcggtgggtattcagccggatgccggtccgagtcttatcttcattacactacccaatgtattccaacaggcatttagcggagtacctttattagcttatatattttcagtcatgttctatattcttctggcagttgcagcactgacttccaccatctctatgcacgaagtggtgacggcttatctgcacgaggaattccacctgagccggaaacgcgcggcaagcttcgtaacgggcggttgtatatttttgggaaccttatgttctctttcattgggagtaggtaaaggatatactctgttcggcttgaatttattcgacatgttcgactttgtcacagctaagatcatgttaccgttaggtggtctgtgcatttccatctttaccggctggtatctgaataaaaagattgtctgggaagaagtcagcaataacggaacactgaaagtaacgttctacaaattgctgattttcatattgaagtttatagctccgatagcaatttcactcatctttattaaggaattgggattcttgaaattgtaggagatgcagaatctatttaaagatttcttttacttttcccggggagaaaagcgaggtatcctgatgctcatagcaactatctgtatcgtttttctcgccgggtatcttatatccgcctggcaacgaagagatcagatctctctggatgacaagcttatacaagctatcgcccaacaggaatatgaagaattcatagcctcactggaagaaaaagagcaatccggtgaaaagcaatatacgagttataagccaaagaaggtagaaagcattcccatcatcttggcttctttcaatcccaatacggcagactccataacattccgacacttaggactaccagcatggatgacaaagaatatcctgcactatcgggcaaagggtggcaaattccgtaaaacggaagattttaaaaagatatatggaatgacagaagatcaatactctgttctgtcaccttacatacatatcccaccggaagacacagtacgtcatacaccacaactgtatattacagaaactgtaccagtggaaaatataaaatataaaaccggcactattcttgatcttaatcgcgccgacaccaccgaattaaaaaaggttccgggtatcggaagcggcattgcccgcctgattgtgggttatcggcaacgccttggcggattctaccaaatagaacaattaaaggatatcaatctggatacccaacaactgcaagcctggtttagtatcgacctgacaaatgttcaccgcataaacttgaaccacactggcatagacagattacgctcccacccttacatcaacttctatcaagccaaagccattgtagaataccgcaagaaaaaaggctcgttaacgagccttaaacctttctccctttacgaggaatttacaaaagctgatctggaaagaatcagccactatgtctgctttgagtgatagccttaaaattacttctccaaaactcctgaccggatagcagcatcacgttcattcttcaagcgttccttctcctgtttatattgatttttaagggacctcaccttgtcttttttgacatctttagataaagaactattttcaatagcctctttatctttttcaaatttcgcttccaattgatcgagtctattatcgtaatcatctttcatgatgccgcgcaagccttcaccattattcatacttccataatgcgtttcccatgctttgatttgattttctgacaagatagccctaatggcagctttgtgttcaagagccaacgccctcttcttttgccccttttcatatccagtaaggttactccgtccaatagctctaaacttaggtcccacttctttatttagctttttgatttttgcaatttgatcggctgacaggttcaacaccttatccgattcgattcgtttaaaggaatcgaaatttacatcctgcgcataagcgaatgacacaaatgcagatgcaactaaagcaagaattacttttttcataatgcaatctatataagttataaaaatcagggctaagatataacaaaatgttataatttccatccatcttatatagaaacagatttaaaaggcgtttgtttttctaaataaaaaatagcaattgatgcaactttaccagactctacttcgtctaatcaatagaaaacaatctgaaacaggacaggccagtctgaaattagaaattaaaataaaaaaatcacaatgaaaagattattaatagccatactaatagtcagtatggtacagggagtatttgctcaaaaaatagagataaaaggtactatacgcaatgcaacagacaatgaagccacagaatttgtaaacgtagtactacaaaccaccgactctgtctttgtaaatggtgtgtctaccaacaataacggaagcttcatcttcaataaagtagaagctggaaattaccgattggttctttcttgtgttggatacaacacacaatacatcacattgaatggagtaaaacgtaatacagatctgggagatatttttctggaagatgcctcagtagccttggagggtgtaatcatcaatggttccaatcaaatcaaccgtcccgaccggaaactggtattcccttccgaacgccagatgaaagtctccaccaatggagtcaatctgttacaagaactgatgctcccacgtatccaggtcaatccgatgaataacgaaatcggaatatccggtgggggtgaactacaaatacgtatcaacggagtcaaggcagatatcaatgagataaaagctctgcgccccgccgatatcatccgtatagaatatcatgacaatcccggcttacgttatggcaatgcggaaatcgtactcgattacattgttcgccgccccgatacgggaggaagcttcggcaccgatctcagtcagggaatcaatgcaatgtggggaagctacaatgtattcggtaaagtcaatcataaaaaatcagaattcggtctttcttaccacatgggcccccgcgatttctacggtatgtatcgggataatgaagaaacattccgcttagcagatggaaataccactcagcgcgtagaaaagggagaacccagccatgccatgttgtttatgcaaaatctgaatgtcagttacagccttcaggcatccaagaattctctcttcagtgccacattccgcctgcgtggaaacaatcaacccaattgggattaccaaggagtgctctataatgtgaatgatgaaacagatatggtaaatatgatagaccgcaccaagaatagctggactcgcccatctttagacctctactatcagcaaaacctaaaaaagaagcagacgttggtattcaatctggtaggaacttacaaccgggagaagtcgcaccgtatctatcaggaaagcctacacaacgaaatgttgactgacattaataacaatgtattgggtgacaaatactccttaattggagaagccatttacgaaaagcagttctcaaaaggaaacgcattaagttttggcttaaagcacacccagtcctattctaacaacgaatacagaaacggccataattatgatacccggatgaaccagggaaacagttacatattcagtgaataccgtggtaagataaacaaattggattatagattaggaatcagtctaacccgtttctattacaaccaaagcgggaatgatgattcttctaaaaagtacaatgtaaacccgaaagctacattgcattacactttttccgagaactcatacctccgttggaaagccgaagtattcaatgcaactccttcattgagtaacctgagtgctatagaacaaactatagactctttccagatacgccgtggtaatccaaacctgaaatcgtacatgtgctatcgtacggaactgacttatgaatggaagaaaggcattttctacagtaatctatggggtgcatatgattaccgtcccaatgccattatggatgaaaagttacaggaagacaataaaatagtacaaacgtgggataaccagaaagactggcaaaagttatccggacgtctgatgctccgtgtaggtccactatgggatatgctacaactttcatttacaggaggagtgaaccattatatgagtcatggaaacaattattctcatacttatactaactggtattatgaaggacaggcttcattcaattacaaacgattctccctgttctggcagatcaataccaattggaacaacttttggggagaaaccctctcaggaggagaaaacatccagatattaggtctatattataaatataaagatctccgtttgggcgtaggtgctttcaacccattcactgataattataaagtagagaatgagaattggaatcaatttgcctcgtacaagactaaaagctatattaaggaaagctcacgtatgtttctagtcagcttatcctacaatttttcttttgggcgtaagttcaaagcaacacaaagaaaagtaaacaatagcgataatgaatcaggagtaatgagtacgggaaaataagatcaaactatttccccgtcaaccatgtgcaccgtacggtccgtaatccgtgccagtccttcatcgtgagtgacaataacaaatgtttgtccgaaacgattgcgaagatcgaagaaaagctgatgcaattcttccttattatgagtatccaggctacccgaaggttcgtcagccagtatcacagccggatgattaataagagcacgggctacggccacacgttgtttttccccacctgaaagttcattgggcttatgcccggcacgatcagtcaggcccataaactccaataattccagcgcagacgcagtagcctctttctgccccacacctgcaataaatgcaggtatcatcacgttttccaatgccgtgaattctggtaaaagctggtgaaactgaaagacaaacccgatatgtttgttacggaaagccgccagttccttctccttcatacggctgaccaaagtaccgtcgatcgttatcgttccgctatcaggggcatccaaagttcccataatctgaagtaaagtagtctttcccgctccactcggaccaacaatactaacgatctcgcccttatctatgtttaaatcgattccccgcagaacttgcaggctaccgaaactcttggttattccttgtaattgtatcatacatacttcatttttatctaatgaataattacttaagtactgattctttgccaataagatggcaaaagatgtgcttgctgatcataatctcttcaacacatactccgccagataacatccgaataccgccggcatatagctaacagttccacatgtcgatttcttattcatttcatcctcagtcagcagtaccgctttcggatctgcctgctccgtactgaacactaccggcagtttacgcttaattcccattttttggagtcgttttctgactgctttgctcagcccgcaatgataagtatcccatatatcggcaaaacggacctgagttatatcactctttgcaccggctcccatgctggaaactatcttaatatgtcgcttcatggcctctgcaatcaaatgacattttggggacaatgtatcaatagcatccactacaaaatcataggaggccgcgtccagcagttcaggaatattttcatctttcagaaatacgggcaatacggtcagttcaatttccggattaatgtcccggaagcgtttctcaagaatttccgccttactcatccccagcgtagaatgcaaagccggaagctgacggttcaaattcgttggttgcaccatatctgcatccacaatcgtcatacgccctactcccgcgcgacaaatcatttccgccgcatacgctcctactccacccaggcctactacaagcacatgcgcctgccgtagccgttccatcttttcatcacccaacaagagttgtgtcctttgccgccaattttccatccttactaatcacttatcacttttcctaaaccatttatagaaccatttacccaccttttcataatgctgatcctcattattgccacgcgggttagagaatgacaacatatcttgaggctcacccaattgatccggatacagcactatcaaactattattggcaaaatactttcctaattgcgcgggaagtctctcaaatgcaggatcataagaaatagaaccacgacgggcactgataatcacgagtaaatgatcataattcacctgcccggtcagcaacaacaaatctccccaatcgtccaaacgagaaaaatcagtcatggtggagctaaatcttttcttcaccagaatttgcaaaagcgtggttgtttcttcgttagcgaagaaatgcacccggcaccccaatgtatttcccatacggcagaaatgttccacccacttctggaaaccggcttcatattccgctttgggcggaacggcaatattaattctccgtaaagtattaatcggcatcaggaacttagcaatcattacttcccggtgcaaacctttcaacaaattctctgccaacataccaaagaaagaatccacgatattcaccttacggtgcaggccaatcactacatccgtcactccatgttctttagcagtatggataatacccgaagcaatattcagatcataacgactaatttgtttcagtgatacatccgctgaagccgttatcatcgccgctttctccagataacgttttccacggagttccaaagcttccgatgcattattatcatttattacgttcagcgccaacagattatccctctgcttagggtcacgtatcaccaatgacagatttaccaagtcttcaatcgtatccggatttgcaaccggtatcaaaatcttctctagttctgccggacgcttttcatcctccaaatgcgcctcatcaatagctattttacgggcagcgcgctcagtaataaacgaactcaccacgcaagtcacaaggataagcaacacagtaccgttcagcacatcatcattcagcaacctttcaccattgggcaagatgatgttatatccgaccaagacggcagccagtgtagcagcagcctgggcattacttaaaccgtacatcaactcccgctcaatggctcccatcttatagattttctgtgtcaaccagcaagcaatccatttaccggtcaaagcaactgctatcattactcctgccaccttcagagcatcaccatgaccaaaaatcacatgtatatcaatcatcattcccacaccaatcaggaagtaaggaatgaaaagcgcattacctacaaattccaaatgattcatcaacggagaaacatggggtatcaaccggttcaacaccagccccgcaaggaatgcaccaagaataccctccattcctacaaattccatcaatcctgcccctaagaataccatagcaagcacaaagatgaactgcattacattatcatcgtacctacggaaaaaccaacgaccgatacgggggaaaaaatacatgatcaatccaccaaggaaaacgactttaaccaccagccatacccaaaacagtccaccggattctcccttaaacataccacccactacagccaggaccagcaacgtaagtgtatcagtcaccgctgtacctcctacggcaatactgacacttcgatgtcgggatacaccataccggataacaatgggatatgctaccagagtatgtgaagcatacatacttgccaacaggactgaagtgatcaaactatacttcaagaaggtcatgttcaccaccaaaccgatcatgattggaataataaaagccaataatcccagcattacggccttcccccgattctgcttgaaatccgccatattcatttccagaccagccaaaaacattatatagtataaaccaactttaccaaacagttcaaaactactatcccgcgccagaatattaaatccatgctcaccaattaccaatcccgccaatatcataccgatgatatgtggaatacgcaatctattcaacaaaatgggagcaaacaatatgataagcagtacaaggaggaatatccatgtaggatcagtaatcggaagtttcagactgaagtcaaataagtccatgggcttcaagttttaggttttacgttgcaaaataacaaaaaagttttcattttatacgttgtcatacagcaaattgttataaatttgcagccaattctatcgtttttaagcatagaagaacatttttataaacttaataaaaaacaaaagaaaatgaaagtagctattgttggagcaagcggagccgtggggcaggagttcctgcgtgtgctcgatgaaagaaatttcccgttggatgagttagtgttgttcggttctaaacgcagtgccggaacaaaatacacattccgcggtaaacagatcgaggtaaaactcttgcaacacaacgatgactttaaaggggttgatatcgctttcacttccgcaggcgctggtacctctaaagagtatgccgagaccatcaccaaacatggtgccgtgatgatcgataactccagtgctttccgtatggataatgacatacctttggtagttcccgaggtaaatgctgccgacgcaaaagatcgtccacgcggcatcatcgccaaccctaactgtaccactatacagatggtagtggcactgaaagccatcgaacagctttctcacataaagactgtacacgtttctacgtatcaggccgccagcggtgcaggtgctgccgctatggatgaattgtacacacaataccgccaggtgttagcaggtgaatctgttactgttgaaaagtttgcataccagttggcattcaacctcattcctcagattgatgtattcactgataatggatacaccaaagaagaaatgaagatgttccacgaaacccgcaagattatgcattctgacataaaagtaagcgcaacttgcgtacgcgttcctgctcttcgttctcactctgaaagtatttgggtagaaacagaacgtcctatttcagtggaagaagctcgtgaagcttttgcaaaaggcgacggtttggtattgcaggataaccctgccgaaaaggaatatccaatgcctttgttccttgcaggcaaagaccccgtttatgtaggtcgtatccgtaaggatctgactaatgaaaacggcctgactttctggattgtgggtgaccagatcaagaaaggtgctgcactgaacgcagtacagattgcagaatatttggtaaaagagaatgctctctaagcattactaataaagacatagccattaaagaaatggtaattaatgaagaagaggctgtctcgaatgtgagatagcctcttctttcatattacaatataaagaaaaattcaactttcatggaacaatacacattcctttatagctttttcgataagtttcttcgcagcaggcctgcacccagggaaaaaagatgtatcaaaaacccctttctttgaagttttacgccaattcccggtaatacggccttgatggagaattacagattgaaatataccaaaattattataagcatacttcgtatgcgcttcctttatacagtctaaacgatttttgtaacttaccaggtattcatcaaacggtggaaggaactggaatacatttctttcatcaatctccacctctcctacaagcccgggcgaagaagcatgtatcagcatttcacggtcattataccgctctgttatcatttcagtgccaagtgaagcgatggcattacgcgcttcgcctatattcaatgcagaccaccaaacaaaatcttccagtgtggccggaccgtggctcctgaaatatcgccgtgtaagttctgcaagagcctcctcatgggagagctcgatggcatccggaattctttcacaggtcagtgcgtaggtatgctttccgttcttctcgatgccgctgcacacggtaccgtctgcctcgccaaaactcagatacattttcacgatgggttcatcgagagcaatgccctttgagtggagttgttcaagaacttcctggctcgtcaggtgttgtccgctcaacacttcttctatctggggcttactgcggaggaagtcttcttcagtcagactgaaatgcttggcataaaaacgaaatttagacagcagacctttagtggataaccccgtcatccatttgatgtctctaccgggaatgtaatgccacgtgggacgcatcacatgaagacgcaaaatccggcccgtatccagcgcctcttgcacagccgtcagcgagggacttgcaatacgcaaccctacagcccacttcgccgccctgatgtcctgtgcctgcatggcacccatccattcaacaacttcctccggcttttcaaaccgtggtcctgcaataccctgtgacaacattcttagtttaagcatggttcaaatgataaaattatgattttagtatcggacagctttttacaaagatagagaatattttgtgatatccaacaacgcccctataccccaacaagaaagaggttggactctaacaaatagaatccaacctctttcagttacgccattaacaatctcaccttatttccagaacggattctgttccatattcgagttcagagtcagctgagtagtaggtataggatagaaataatgcttagcctcgtaggtacgcggttggttgatggtattggaaccaatcatgtatccatcactattaacatccacttccggattttctacattcttcatgttagccccaagatagatcgtaggattcttggaagagtcaagtaaatcaagcttatgccaacgaattaaatcccaataacgtgtccagttatcgcacatcaactcacaacgacggcaacggcggatttcccaaagcaaattactgacccccatattattagccggatcggcttccggactggtagtcatagcgggcagaccggcacgttcctgcaatttattgatggaattatcaagatcggcttgcgtcaatgttccaagctctgccttagcttcagcaaagttcagatagacaacagacaaccagaaaagcgggcaatctgtatattgcttaccaatactgttacggtcacttactgacaattccgccgtattatcatatttagctatgccataaccggtagtagaagtaaatgcagcaactccggcacggctataagcactacccttaaagcataatacaggatcgagagtaatcgccaatcgcttatcgcgaacagcaagcacagactcaaggttatactttccatttgcatcttttactgcggcatcattggtatccattgtagtggttgctttgggcttaccatcaaggaacaggtaactgtcgaaagcatttttagtcataccgctggtaccactggtatttatagtgtagtcaatagtagaatgcataaatgtattctgcgaataaggcttatagaatatcatttccggattggagctgagcgatattgaattataatttccttgatagctcggattcaatgaatatcccttccccatcaaagtttcacaagcagacacacattcacgcaagtacttctcagcacgagcgttgtcggcagccttaccagcattgtcatttgcattgcgatacttacagtaggtaccttcgtacaacgtgatgtcagctttcatagccagtgccatgtcagcactgaagcgttgcttgttggttcccgtaattgtagtcgtagcatagttcagatcttcaaggacattgtccattacaatatcgcgatccgtacgtggtccgtaaaccacatctttttctgccgggtctacaaccgtagttatccactgtacgtcaccatacatgcgaaccaattgataatattcccatgcccggttcaaacgtgccagaccttcataattagctttaacagcgtcatcaagagaagatgttttcaatccttcgataatataattagcacgacggatttcggtgaaagggtcggaccaatttgtagaagtagctactacacttgtataagtccagactgtcgactgatagtctacctgatcatcactcaatgtcttaaaatagtaccatccgctaccactgccgtttccataacctgaatagttgttatagaacgtattgcattggttgtcaagattactcgtattactccaatatgcaggagtattggtaaaggcatccaaaggtgctttgtcgagaaagtcattacaacttgtcaaggccatcagtgccattgttccgtatatgaatagctttttcatcattcttattgttttaatcattattataaggttacctgaataccgaacgagaaagtacgggtaataggtgccgtacgtccccaacctgctgaagtaagcccgtcgcctgtactgatttccggatcaacggggagatcgctacccttgtaaagcaagaagaggttgctaccgctaaagtagatgcgcgccttttcgatgaaagctttgcgggtccattccttcggtaaagtataaccgacagttacgttctttaaacggagataagacatatcagtcaagtaacggctttgcggatagtagttgttggaaccgttcgcaatacccgatacagtacctttggcttcatttcccggatataaacgaggataagtattgccttggttgatatcatagccggtaattgttttccagtcatcgctatagaacactctgttgtaacttgattgatgttcgtaaacagctaagtcggcagaacgcatcatcgggaaattcagagaagcaatagtccaatcagaacgtttgcctacgccttggaagaacaaatccaggtcaatgcctttccaactaccacctaagtggaagctatattcgtaacgaggaagtgaattaccgataactttcaagtcaccatgatcatcagctgttccttttccaccgtcaatcgcaccactgccatccaaatctttgaacttaatatcaccaggaccatagtggaacggagcccgttcaagtgcggactggctggcaacgcctgacttatagatccatgaaccatctgcattctgacctgtaaagtctgattcttcaaaataacgatctgtttcgaagccccaaatgtcaccataagtcttgcccgaaaaataagagctaagcaacttagtatcattattccactttgttactttcgttttagaatcgctaagattgaaattggcataaacattaaattcaccgaatttatgatgccagtcgaggttcaactcccatccacgagtacgcagtgtacctgcgttatcgtaaggagcagtggcacctacactgttcggcaaaacttgagctggagcaagcatatcacggttttcacgttgataccagtcaaaacctacggttagttcattattcaggaaacctaagtccaaaccaatgtcagtagtgcggatacgttcccaggtaagagacttcgataccagtttaggcatattgtattgagtcaatctgttagcattggccccattgccatctacccaataaatatatcccgtagccgatgtattttcacgttggctgatcaattcttcaaacatatagtttccgatagcttcatttccaatttcaccataggatgcacggaatttagcattgctgataactttcttcaacggtgcaaaataagcttcttccgagaatcgatatcctatagaggcagaagggaagaatgcccatttatcattgtgcgggaatctggaagaaccgtcataacgtccattcacttccaacagatagatacccttataatcgtagttaatacgaccgaaataaccggctgatgcacgggaagtatgtgaccagtttatttgctgtccatcttggctcgccaaattcaattcgggatatgcttcatcatacagtcctttgcgatatccatataaataagtgtaatccacttcttccgcattggctccaaccattacattcaagttatgactttttgcaaaagtcttggcatagttggcatacgcattcagagtccaagtattctgcttggaattatcacgccaaatagctgaattacttttggtaacgatatagctgggaacaggcattcctgaccagttgataccatagaccgaaaagtcctcagaaccactgttcaagttctgaattgcataagtaaaatcggcatttaaagtaagccccttgataatttcagctttcaagaatgcattcatacgagtaaggtctgttatttccttacgatcagatgcttgtttacgcatagccatgaggcgagtatcataaccatcaatggtgcctgatggaatgaagaaagaaccccagcgccaaagggtctgataagtactactgtaaatatcagggcgttgataagccttgcgggagtaattgacacgtgcgcctacttgcaaccaatcatataaattcgtagtcacatttactgaaacgttgtacttcttcaactcatccggacgcaccttcataataccttctttctcatcatagccaaaagaaaggtagtagttagttttacctgaacttccctgaacggataagttgtggctctgcgaaggagcagctttgctataataaatatcctgaacatcccaatcggcatagtaataaggagttccgtcaatgatggtataatcaccgacattgctatcgctctgatacggtctcatttcaccgtatttcagttttcttcctccattctgttgtgcccacttttcggcataaggcaacaacttatcgaaatacataccaaaaagttcgacttcatattggttggcatttgccttagcctccaacgcagaacgaagttgtgtgggaacatccgagaaattcggaaggtaggttgcttgatcccaagcaaagttattgctataatttatagtaaccttttccgtcggtttagcactctttgtattgatcaaaataacaccaaaggcagcacgggtaccataaatagaggtagaagcggcgtctttcagtacagagatactttcaatatcctgcgtattcaagaaagagatatcgtccatcggaactccatccaccacaatcagtggattactcttttcagaattgcttaacgtaccgacaccacgaatacgcattgaagcattcccgttgatatcgccattttctgtagtaatgctcaaaccaggaaccgcaccctgcaatgccttggatacatcttgctgagggcgtcccgccatagtcttattcaagtctacagtagttaccgcacctgttagattagctttcttctgtacaccataacctacaactacaacttcatccagtaattccgtatcttccttcaacacgattttcatagtaggtgtagcttttacttcctgaggctgataacctacgaatgatatttttaatatagctccagtctttacactcaaaataaacttaccatcgatatcagttacaataccattcgtcgttcccttttctaccacactggcaccgataatcggctcgcccgtcgcatctacgaccaaacctgtaacattaatagattgtaactgctcagttacttccaagacattatccgaagcaacttgagtagccatcacattaccgctacttaaaaacagtgcgctcattgctactactgtgaggaatttgctatgtgctaatcctcgttttttgcgatcttcattcataaaaagattgatgattttgttattaattaaatagttctctctaaaaagttggggtaaggatagtcagttagaaatagctaaggctatttctcctgtcagataagtttctgtttcataggctctttctctatttataggtttaacttatattatatctctattaccataattacatatcggctaagttccaagagaacattgccgagttttttatggtaaaaagaatacaataacacctgttggcagaattaatatctttctttcagattatgaattaaatggagtatcatcttatacctattatttaatctgaaaatactctttcaggtccttcagttttccccgaacgccctgttcatcggtgttacagctgaaacttccaaccttatgactgtttcaggtatctttcagccggaatgccgatgaacagggcgttcggggaaaactgaaacctgaaagaagaaagattgacctgaaagcaagtaatgttgtgatctggaacaagtaatgttgagaatgattacattgcttgttcttattcacaacaagcaatgtaatttcaggcaagtctgattgcagcctgttcctttagcgtctatatatcggtgacgttggatatatagatactgcgcatccgatatatagatgtgacgcgtccgatatatagatgccacatgtccgatatacttatcttttatgccttgtttttgtataaaatagaggattatttaattaaagcccatttaattagctaacgccaaattattctttgtgtttttcttattagaaatgttatttagctctttattatttgtttatattccgatttatggtatatttgccaataaacggaacctgttttgtgatattttgccaataatcggaacataaaagtagttgttatggaattatatcgtagtataatcgaagaattgaaaacgtggaaacgcaatccagggagaaaacctcttattttaaaaggggctcgtcaaactggcaagacatggattcttgagtattttggacgaacagaattcaaatacaccgtcaaattcaattttgataaggatcattctatccatgaaatctttaaaatgaccaaagagccttcgcggattatctcgcaattgtccttactgaccgattaccctatcttaccgaatgagacattgctcattttcgatgaaattcaagaatgtaattctgccttaaactcattaaagtatttttacgaagattcacccgaatatgttgtagtagctgccggttcattattaggcgtagctttgactaaaggggagtcatttccggtaggcaaagttgattttctcgatttatatcccctcacattcaaagagtttctgaaaacagccaatgagaaactatataattacgtggaagaattgtccgagatatcagctttacctcaatttattacagaccgccttagcgagttgtaccagcagtatttggtaataggtggcatgcctgctgtcatcaacagtttccttgaaaacaaaggcatggaaaaagtcaaaaaggaacaacaggcaatacttaacgcctatattttagatttttcaaagcatgctgaaaacaaggatattccccgtattatccatatatggaattctatcccaagccagttagccaaagagaaccggaagtttgtttacaaaatggtcaaacccggcgctcgtgcccgtgattatgaagacgctctgctttggttggaaagcgcaggtttgatttatcgggtgttttgtaccaccaagccctttcttcctttaaaagcttacgatgatttgtctgcatttaaagtttatttatctgatgtcggattattacgtgaattgtcaggtcttccgccggaagctatctttttaggaaatgaaacttatacggaatttaaaggtgctgttgccgaaaactacgttttgcaaagtttagcgcctcaatatgacatccttccacgctattggacttctataggaaaagcggaagtcgattttatcattcaatccgatagtgacattatccctgttgaagtaaaagctcaaacccgtttgggaggtaaaagcttatctgtttatgatgcaacctatcatccggtatgcaagttgcgctattcattaaacaatctgaagcaagacgggacactgattaatatccctttatatttagcggattggacaaaaaagattgtatctttcatctcataatcatccgcttattgtcccttggtctttatcgttacattattaaatggccattaatttaatgaccatttaataatgcaactttagtcggtaatgttataaatagactcagcgtgcatacacaaaatagagatttgctgtacattattgaaatctacattgttttctttgataaacctctttagttcttctttttgtttaggatatagtttcaaaaactgattgaaattcttgaaaggctttttctttcctttttgctctatccaataaatgttatatcggctcccgagtattaacttctccggatcgaaatcataacgttctccgtgtcctgcatacgttcctccgtatgtttttacagaagttgtttctgtaggttggccgaacgcaccttttgaggcttctttgcgcatattccctttgtattgtacatacagtacaggattcgtcggcaaaatctcgataccattattcccttccgtatagaacacccggttaccgaattttataacctgtatatcttgcgggttacttaatgctttcaccttattatcaacacgatcaacaaaataaaatttgtttgccagtatgttgtaattcattttttcgcgaaattgcgaaccgttcttgaaatagacaaccgcttcttgaaaatcatcaaaaagaaaagaagaagtattcttgtcttgtgcatatagcatacatacagtgcatgcccaatagaataaaagcaaacattttttcatatttacattatattataaatgaataaacaataatgcccgactcatttatgctgaaaacacaaatgggcgggcattatattcttaaccagaatgattcagaaactattatacaaagttaccaccctgttgtctgcgtcagtttgaaacctttctccgcataagcattgatttcttgctctcctacaggagaacaataactccggtcactgaaagtattacgcggctgaacattagtaggcatataataacctaccatttcggaggcattgctcccatcgaaagtaatgactgtaccgtcttccttcttgacctgtctcttgccaatatactgttcatccaagtaagccggaacttcttttaccatatctacccaagggcctatcattgtatccgggtacttgttgttgtccatatactccaatttcttccaacgcttgatgtcatgcaaacggcagtgctcataaaacaactccatgcggcgttcacggcggatttcccaaatcaatggggtgacatccttatccctggcaggatcaaaattttctgttatatcggctaataccatatcggcagtgtttttcagtcctttagcctgtgcagtagcatccagcggacggcgtcttaactgattaatagacgcgttgatatcttcttgagttaccccacccaattcagctttagcttcaatccaatttaacaacacttccgcataacggattaccggagcatcatttgtattggtattagaatcataaataggattgttcttgggattatccatcgtcaatgcttcacgatcgatgaatttggaagcatacagcagtgtgacagaattgatattcacatgatcaataaatgttgcctcaaaacgcggatcgcgagtttttgccaagtttgctacactcaataactttgcattctcaagatcagaatgctgataaactttaccatcctggcaaatgaaagactttgctagcgcaagattgggggctggcgcctggctttctacaccattagaataagatgcaatatggtgtttaagcatttcgaatgtataatgacgatacataatagcctctttattacctttcaagtcctgcgaaccgaacacatcacggaatggagtgtcgatagcgtatttaccgctattgattactatttcggcagcttcctttgccaactgcaaatatttgtttgccgcagtctggtctccgccatgatacttctgccatgtcccctcaaaaagcatccagcgagaggcaaacgctgctgcaacataccggttcaaagtgttatcgccatcgttagtgcgtatattgaccaacacttcattctttaacatatcataaactttatccattacaaatacacggctgtcgcggtctttatacatggcttccaggtcgctattggcaaatgaggtttcatagtagggtacgtcaccaaatacagctaccaaccgggagtaagagaagcatttaaagaaagctgctacagcatgccagtgattatacgcttcttccgttacattccctttcatattagcttccagacgttccataaaaacgttcgctttacgaatccaggtaaaattccaagtcggaccaacgtactgggtctgataggtagccaaatcacctgtatttgaactgccaagggtactgggaatcgaattgctaaacgatgactgctgaccagtagaagctaaatcatccgaaaaggagtaaccacgcaaaggagcataattagttgtccatccatcagcatagcctacaaaatagttcctataaaacccgttggcatacagacgggcatccatctcggttttccaaaaggtgccatcagtcggagtgtttagttgcgggcggtccaaaatgtcatcacaagatgtagtagctagaactaccgcagagagtatgattaatatatattttttcatattgatatatttttagaagtttaactgaatacctacagacatattcttcatggttggcgtaccaacacctgtacggccggagttatagtttgtagagttgaacatagagaaacctgagatttcttccgcatcaatcggcaaacctcccagtttgtcaaacgtaaagaaattttcgcaggccacataaatacgagccttgttaatcagtactttcttagtccatacggcaggcagtgtataacctagcgtgatgtttttgatacggaaataagacatattgagcaagtatcgatcctgtgtttgcatgttgaaaccagtattggaacctgccagattataagcggccggataaaaagcatctgtacgatcttctctccaataattacctgcaatagcctgcggcatagcaccgtcacccgtattaaagccagggatagcaagaaaaccggcaccccaaatatcgcgtttacctacaccctgcataaagatagagaaatcaaagcctttatagtcggcacccaaacggatgccatattcgtaacgcggtgtagagttaccaataacttccaagtcccccgtatcacgtttaccgtaattcggatcattttcatcggttaccgtacctactgatcgggaaccgccatcaattttcccatcaccattcacatctttatatttcacatcgccggggccaaactttattgttcccgtttggaaataatcttgatataccccattcggatctttcagtttgttcatttctttagcgccgggagtgttagcgggcacttctttaccattcaaggcccaaacggtaactaatttaccatcggcatatacgaaatcgtctttttgataaaggcgatctgtgcgatagccccatatttcaccatattttttccctatataccaactgtcaatgctctttgtatcaccataagcagtgatttcagtctgggcatccgacaaagaaaccatagcgttgatccctaatccgttttcaaatcgatgattatagtcgatagaaagttcccagcctcgtgttcttaaagagccgaaattccctttcggagaaccggcaccaaaagtccatgtaacaccttcacccggaacaatcatattcttggtgtcgcgttgataccagtcgaatgttacccctaattcaccgttaaagaatcgcgcatcgaaaccaaaatccaatgtggctatatcttgccaagtgattctaggatctactgccgctggagttccggcataaataatcttattaccactcggatcaagccaacttgcctgtccctggctgatagtgggcacatacaatgaactggatacagtctgatcaccaatcataccccaagaacctcggagtttcaaagaagagaggaacgttttggaccagtccatgaatttctcttcactgagacgccagcctaaagagaaagaagggaatgcgcgccattgtagattgctgggaaatttagaagaaccatcatagcggatgttcgcttccagcaaatatttgtccatcagattgtaattgacacgtccgaagaaaccgagctgaccatcccagtagaggttaccgctggaagtctgcgtgccgatggttttatcccaactgaggttattaatatctgtaaggttagtgatctgcgaccagttatcttcagattcccagtcagtccggttcattccaaccaataccttcaaattgtttttttcgttgatctgccaattataatcagttgtaatattgagcgtatgtcttttagcgttagtcacttcacgacgaatatggtcaggattagcgccgtctgcagtatactgccgatagctcaagccgtatgcaggcatagcaccttcagtacctgctgataccacttctcccatattattaacgtatatttggttaccgttaccatccaatctcttgacgggagacgtccatgtatcagcggctgtaaatttagtaccgttttttttccatatctggtcttcgcctgcataagtataatcgatgtcaaacttccagtccttcgttatttgcagagttgcgcctacattgaaactcaagtaattattctctttgtttgcagtgttcgcctgatgaatttcagaagccggactgcgcatttcatttccgttctcatcatatcctatcggataagtactatcccaacgatagagatagagccatgggtcagccgttgtagagtttgtcgcgtaagcatagcgtttgttacgttttgaataattagctccggcacgggctgtaatatacttgttgatttcggtacttaaacgtatagaaccgttccatctgcggaaatcatcatgtttagccaatttcatcaaaccattttgatccaaatagcctaaaccgacattgaacacagtcttaccactcctgccgctcaacgagatattatgtgtttgcgaaggagcccattcacgaatcatgtaatcataaggatcgaaagtacgtatagagaacttacgattagaagcatctacgtaccagtcgcggccgtatacgaacggatcattgactcctaacttccccccccaggttttgtcccattccttagctctttcaagactggtttcatctacataccagaatgctccatatagagtgcctttggcacgtttcagcgcatcaatgcgatactgaataccatcaactcttgccatttccatctttttggaaatattttgccaagagaaattaccggaatagcttacttctactttctcacttttagcacccttttttgaagtgatcaatactacaccaaaagccgcctttgcaccataaatagaagcagaagctgcgtctttcaatacggtgatagattcaacatcatcagggttcaccatctgaatagaaggaatctccacgttgtctaacaaaatcagcggtgtagagctaccatcgatggagccgatttgtccacgtacttttatagtcggatccgaacctatttcgccacttggaataacgacagacaaccccggcgtagtgccttgtaacccccggccgatatcaggaatctggcgtccctctaaagtcttgcttacatctaccgtcgcaattgctcctgtcaggttctctctcttttgagagccataacctactactaccacctctgatagaatttcactatcttccgccaaaactattttcatagttcgggtagcttttacttcttgaggttggtaaccgacataagagattttcaatatagcccctagccttacattcaatgtaaaccttccattaatatctgtaataccaccgttggtagtgcctttttcgaccacgctggcgccaataatcggttcatcagaagcatccaagactacacctgtaacagcgatagtttgtagctgctcttttatatccggaacattgcctgaaacagtttgggtagccatcacattatcgctgcctaatagcagtgcactgattgctactgccgtgaggaatttgctatatgccaatcctcgttttttgcgttcttcattcataaatgattgatgattttgttgttaattaaaatagttttctctaaaataattagggtaaggatagtctgtatagaaatagctttgactatttctcctgtcagatagatttcttctccataggcgttcttctattttataggtttaacttatatattatctctccttatttatattacagtccaacggttccaagagaacttggtaaatatgtattagaaggatagctttgctctaaatttatttttcgatgcctaccaggagcaactacgactcaggtacgtctcgggtatagccagaatgataaagggatagtctattccgattcataaaaattgagtccttataggaatgaactttcaggaatagaatacttcctccccttcaggaagtagctgtgagggcaatttcagatggctacaccctttacttcggatggctacacccttttgacatgatagctacaccctttatagcaaaaggtgtagccctgcaaaagggctacttaacccacaagaaaacgggttacaattcttccatataaatttaaggagatatgcagtagttcaccgtgtttttacactttaaccatgtattcctcagatattctttttagtaagtaatgcaaagcacgaaaaccaaacgattaagtgaagttttggaagtttttgtcttggtatattaaaaaaaactatatatttgtatccaattctaaatctaactgcgtatgaaactgattgcagagagtggttcgacaagaactgaatgggctttggttgaagacaatcacctgatacaacgtgtttttacagagggacttaatcctttcttccaaacccgaagagagatcagccggagtgtgcgtttaggtttacccgaaacttttttcaaaagaaaactggagcaagtatattattatggagccggttgtacttcttatgagaaaaagaatgtattgggtgcctcattagtagcacagttcaaaactccgatccaagtagagagtgacttacttgccgccgcccgtggtctgtttaaatgtgaagcaggaattgcctgcattttaggcaccggatctaattcttgcttttacaacggaaagattattgtaaaaaatgtcagagcaggcggatatatattgggagatgaaggtagtggtgctgtattaggcaagcattttctttcggatgtactaaagggcttggctcccaaagaggtaatggctgatttctttgagaaattccgtattagccccaatgaagtaatggagtctgtttataatcgcccgtttcctaatcgttttctatccactatttcttatttcctggcggattatacgagtgatgattatgtttacgaactaataatcaccaatttgcgcaacttcttcacaaggaatgtatgccaatatgattataagaactatccaatccgctttgtaggttcattagcctatagctatgccccgattctaagagaagtcgccggtgactttggcattgagttggacgtgattgaagaaactcccatgaatggactgattgacttccactcattaaatattgaagaaccttaatatttgtatataaagcatatcgtagaagttgcaaaccttctcgaagagcaaatatataaatataaagttaaataaatgcaaaggaatgttcttgatattaaattataatatatctttgctaagaagaaacgaagaaatggcgtttcatcacctttgttaataacgagtttatctcttaaaacaaccaactaaatagtaacagtatttagtgtattttaatttttaaccaacaatgtatttaccaagttctcttggaacttagctaatgtataattaaaataagagagataaaatataagttaaacctaaaaataaaaaagagcctatggaacaagaccccacctgacagcagaaatagcctcaaagctattctcaattgcccattcttactctttcagagaagactattttagttaacaacaaaatcatcaactttttatgaatgaagatcgcaaaagaaaaggattcgcaaacagcaaactcctctcagcagtaactataagtgtactgttcatagacattggtaatgtgacagctgcccaacagcctctggtaattctttgagtatgagaaaataacaacattattttcaagttaagttacaaatattcaaagcaagccaatcatatatgatgatataattctggactattaaccattattgtttattaaatctatgttaatgcaaaaacttttaattctatcagtaaccggcctaatgcttatatgtggcggttacatccctggaatgagtgtaagtgcacaaaataccacttcgtctagtacacagaactcaagaaggatttccggagtagtgacagacactcaaggcgaaccgattatcggagcaactgtacttgtaaaaggaacaggcatcggtacagcaacagatatcgacggcaagttctctctggatattccatccaatggaaaaaccttggtagtatctttcattggattcgacgcacaggaaattcctgttacaaataatgctacgtacaaaatacagttaagcggaacagactatgctctggatgaggtagtggtgacggctttaggtatgaagcgtgaaaagaaggcgctcggttattcagtgcaagacgtaaaaggggacgctcttattgaaaaccggactgcaaacattgccacatcactgaatggtaagattgccggtatgaatatttcttcaacttctattcccggtggttcaaaccgtatcgtcatccgtggtaacaactctatatcgggtaataatatgccgttggtggtagtggacggggttccgttcgacaactctcaaggcgttgacgacgtaaatacaaactcttggggtgcaggttattcggataccggtgacggactatccatgctgaatcctgatgatgttgaatcaatttctgtactgaagggtccttcggctacagctctttacggttcacgcggtggtaacggtgtgattctggttacaaccaaacaaggccagggtggcagaaccaaagtgtcatacaatagcaactttacttttgaaaatgtaatgattcaaccggaattccagaatgaatacggtcagggtacagacggagcatttgtggctacctcgcgtaactcctggggtcctaaaatgggtacggttgttacagactggacaggacaaacccgtcctttggaagcaaaaaataatgatttttccgatttcatggacaccggtacatcatggaccaattctcttgatatcacaagttccgccggtaagatgaactaccgtgtaggtatgtcaaacacaatgcgtaagggtgttatcccgaagaatgagttgaacaagacaaacttctctattcgcgcaggtggcgaaatcatcaagaacctgactctcgatgccaaattgaactatacttatcagaaaggtcagggacgtcctgaattctctgcttcaggtttcaacccgatatttgctcttatttatactccgcgcagcatcaacctgcacgaaatgaaagatgtttttgataaagacggaaagattatcgactggtatcccagtatgcttacggtggtaaataacccgtatgcactgacttctctcagcggtaacaaggacgtaaccaatcgtatcaatggtttcgcttcattgacatacgaggttagcagctggctgaaagctatggttcgcttcggcggtgacacttatggcaagaagaccgaaaagtggatacgccatgacttgatttcaagtgcaggttataaggatggtcgtttctcaaccggtcaatacaatatggctgaatacaatgcagatttcctggttacagcacaaaaggataagattgcagactccaaaatctccggaatgctttctgttggtggtaacctgatgaaccgccagtacaatagtttctatgccacagccgaaggtttgaacattcctgaactgtataccattcagaatggtcaatccaagactacttcgacttccaaatcagaaaaagaagtccaatccctctatgcactgggacaattgtcatgggataactacctgttcctcgatataactgtacgtaatgactggtcttccacattaccgaaggataaccgttcattcttctatccctcattctctctgggttgggtagtgacggatatgttgaccaagttcaaagtagatgttcccagctggctttctttcgctaaagtacgcgcatcttatgctgaagcaggaaatgacaccgatccatatcagctgttgtctgtattatctacagtttctaacatggcaggtggtcagatgggcgtagcagaaccttctacgaaagcaaactctaaccttaaaccggagattatcaaatctaccgagttcggtgctgatatccgcttctttgataaccgtttaggattcgacgttacatactacaacaaacgtgcatacaaccagatcatatccatgccttcatccatcacttcgggatatagcgccaaatatatcaatgcaggacgtgtagacaactggggatgggaacttcagatgaatgccacgccggttcgcacacgcgactggaactggaatctttgggtgaacttcgccaaaaactcttctgaagtcgtagaactttacgaaggagtggaatccattacattagctcgcccgatgggacaaaactgttatgtcatggctaaaacaggcgaaccttacgggcagatttacacgaatggtttcaaatatgatgagaaaggaaaccgccttgtgggtgatgacggcaaatacatagtagatcctaccctccgcgtttccggtaatatgaacccggattggacagcaggtatcggttcttcattaagatggaaaaacttctctttcggattcctgattgatgtccgctatggtggcgatgtatatctgcaatctatgatgcgtctgcaatctaatggtcagaccaaagaaacagttgccggacgtgaagaattctattcaaccggtaagggcttgatttctcagggtgttaatgtaaacacaggagctcccaacaccgttgaactgaatcctaccgcttattggggacagttctatggcaacatcggaaactacgtttatgatgctaccaacgtacgccttcgcgaacttaatttctcttggatattgccggacaaatggttcaacaagacaatcatcagtggtattaaagtcagtgctgtagccaacaacgtatgcttcctgtacaataaccttccgggattcgaccctgaatgtacatactctactggcaacggacagggtgtagaaaccgctgctctaccgtctacccgttcatttggtttcaatcttaatgttacattctaaaaatgaagataaaatgaataagttatttaaatccattataagcattattggtctttcaatggccttcgcgggctgtgtaggcgattttgacgatatgaataccgatcccaacaacccgacaccgggttcagtagatcctaagttccagctgatattcatacagggacgtggtattccgtatgccaatcagtggcaacagatagaccagctgatgatcagtactttctgtgaatattcggctaacgacggactctcggcttccgactataacatagacgcacgctatgtggacaacatttgggagttgacttacaccgtgcttaccaatgccaattcattaatccgtgccaatgagagcaaccctgttcacaataacgtcgttcagatggcacgtatctggaaagcgtatgctatgttgcgtttaacgaattgtatgggagatgtaccttactctgaagctgccaacgacattgatcagcctaagtatgacactcagaaggacatatattataccatattcgaagaattaaaagatgccgtaagtaaactggatgagtcggcagccaataatgtcggttcttatgaccttatttatgggggtgatgccaccaaatggaagaaattcgccaactctatccgcctgcgcatggctgtccgtatctccgacgtaaatgccgccaaggctaaaacagaagccgcagctgccatttcagcaggtgtattcagcagtgacgctgatgccgccttcctgacgcaaggagaagataaatttgcccagaacccgatttattatcataaaggttcttcggtgttgcatatgtcaacggcttacaaacgtcttgtagaaggtatcggtggacaagcatggcctaccgcagccgaccgcgaagccaataagaatatcaccgaagttattcttactgccaagaatgctcctgcagttgtcgatcctcgcgctccgatccactttgaacccgcaggtatcatcgaaagccctgcaactccaagcatgaacggcaattgggacggcacagatccgggacatgtagcttcgggtgtaggtgctgcaatggacaatggacagtttgttagcgacttctcaaaaatcggtccctggtattatgaaaccattgacagaaagtatcctttgttcaagtacagcgaactgtgcttcctgaaagctattgccatccaacttggtcttacaagtggagatgccaaaacagaatacgaagctggcgtacgctcaagtatgacagaactgggagttccggaaagcaaaatcgcaaattatctagcttcaacttctccaaactattatggaaccacagccaagtatgacgatgttacaggaaccaacaatacacctatggataagattcttacccagaaatacattgctcagttccaggaatgttcttttgaaacttgggctgatcatcgccagttccacaaacctacgcttatgccattcgcaaacgtaagttcaagtgtcttcaacatgaatccttctgatcaggctaataatactccaaacgcttatatcaagcgtatctattatccttcttcggaatacaccgttaacgaagctaacgtgaaagaagccgaaaagcgcatgggtggaagcaacagcatacaaaataacctatggtgggatgttaactaaaaattgattcttatgaaatgcgtagttgagtaattcagctacgcattttgttatacatataacctcttatctgaaacaatatgaaaaatattcttctcttaattcttatatgttgtctttctctgtccaatcgggcacaagaacagatgaatccttcatcaagaatatccggtaaagcaatcaaattacccggatttgtaaccagtccttattttgaggaacaagttatcagctttatccatactccaggaatcaaagttcatataaatgctcccgcagaaactaaattcggaaaggataaacccacaaaacttgtactatatgcactaccgaatggcaacagtacagactggaccatcgggaaaatgccggcagaaggtgatgactggcattatcatatacaacacataggagctcaaacacggtatatcagagcttctgatccggaatgtaactttattacggtttacctggaagcagacaccaaaagctggggaagttggagaaaagctgaacctacacgggatcaaaagattaaagaaacagtagagtatattctttctcttttttccaaatataatccacatatcgaactgaacagccacagtggaggaggcaacttcattttcggttttatggatgcagtttctgaaattccggattatgtgaaaagaatctctttcattgacagcaattacaactgggataatgaacgttacggagataaattacaaaaatggctggaagcttcttccgacaatcgcttatttgtagcttgttatgatgatgctaatgctctgctggatggaaagccatttgtctcaaaaacaggagggacctggcacagaacctatttaatgcaacgatatctgaaaaagaaaatgaaacgtctgtcatggaataaaaccgaaaatgacagtattatttatttcacggcagacaaccgtcggattcagttttattcccgaaagaatccggagcagaagatttaccatacaatactggtagagcgaaatggctatatccagtcagtattctccggtacgaaatacgagggaatgggatatcagttcatgggtagaaaggtttatgacatgtatcggcaaaattcagggtcctggtagacagtaaactatattctttgaacgccttactacaggaccccgtactataaaattgtttagtgataaatcagttccaatggtaattacaagttatattcctgattaatcctgctgaccacttgcaactttccatccttcagcaaagaacgtgcattaaagaaattcacgccgtccgctcctgcttcgatagatagttttgcagctgtatatagctcttcagccgtaatatcgggaacaaataaaccggatacatacttattcttatggaaagtttcgcgcaaaccgttttctatactaaacggtatccattcaaggctttccgaataaaacgactgataattcatcgggcatacaatatctattttccaggtaggccagtcctgataaactgtcatgcgggcacgggtaggataagggaaaacagccgctgaaaccagtttgccttcagaatgagtcgcttctacaatctcattcactaaagaagtgacctcattcaaacggaactgcaaccattccggactcatccacggagcctgcaaatctaacggggagtaaccgaacagtttcttaaatttttctattgccaccggatgatagccaaaatcatattcagcacgataggtatcttgctgaatcttaaatttatgctgttgcaggcgtcgccccagtaccgcatcattatagcgaataaaatccagatgtacagaagtcagtccttccaaagcagcataagaagccgctttatctttcatatactgtcgggcctcaggcacagaaggactcagccatttataatgctttacataagggtcatattcatgactgttataacctatccggttcacatcaaaccattcgggatgcaccaacgccgcagaatccccgggagcattcacagtgaacatccacgcatgcacttttgcaccctgataggacttggcagcctcaatataacgcgccacttcttccggtgagccacacatataataattcttgataccggcctcatcgaaaggcttcatccagagaatcagagactccaccgtggcacttttatccacatcgtcccatactcccaaagcaaccttttgttcctggttttgaactttcttttttttaccggctgataacggctgaacagccaaactgaaaatgcacgcaaatgctgcacataaataagtaaatttcatgatgatgattttttttggttcacagcaaagataatatatcttctatataaataaggtgaatatctgattatttgcaaattattaattataatgctaaaaataataaaataagtgtttttgatattaaaataaaatctatctttgttgctacgaatatcccccttaacaataatactattatgaagaaacttctgctactgatctttttattgtgtagtaccttctggtgtcaggcacaaacagaccggattattttgggtgacgaacaaacttccgagtattttcccatcctaaaggataaacggattgccattttctctaatcatacaggaatgataggggataaacatctattggatgttcttttagaaaacaaattcaatgtagttgccatcttctcgcccgaacatggtttccgtggaaatgcagatgcaggcgagcacgtatccagttcagtagactctaaaacaggggtgccaattctttctctttatgaagggaaggacaaaaagccaagtaaggcttcaatgcaaaaatttgatattctgatagtagatatacaggacgtaggattacgtttttacacctattacataacgatgtgccggctaatggatgtctgtgcggaatataacaagaaagttttgttattagaccgtcctaatccgaatgggcattatgtagatggaccgattctggatatgaaatataaatcaggtgtgggatggttgccgattcctattgtacacggaatgacattaggggaacttgcattaatgattaatggagaaggttggttgcctggttcacgcaaatgtgatctggcagtgatcaaatgcaagaattatacacatcagactaaatatcagctgccaattcccccatctcctaacttaccgaacatgaagtcgatatatctatatccggctacatgcttttttgaggcaactcccgtcagcttgggtagaggaacttcactcccatttcaggtttatggacatcccaatatgaccggatatagctacagtttcaccccaagaagtattcccggagcaaagaatccgccgcagctgaataaactgtgccatggagtagacctaagcaatatgagtgatgaagaaatctggaaacgaggtgtagatttatcttatgtcatcgatgcatatcgtaatctgaatctggatgatcatttcttccgtccattctttgaattgctggtaggaagggattatgtacgaaaaatgataaaagaaggaaaaagtgccgatgaaattaaagctatgtggaaagatgacgttgagaaattcaaggtgcaacgtaaaccatatctgctttacgaagaataaattcatgtactattataaatcataaatcaaccctatgagcccgatatctgtaatcattactattgccgcttatttcgtgatcttgttcactatatcttatatagccggcagaaaagccgacaatgaaggtttctttgttggcaaccgtaaatcggcctggtatgttgtggcatttgccatgattgggtccagcatctccggagtgacgtatgtatcagtaccgggtatggtggctgccagtagtttcggctacctgcaaatggtattgggatttgttgcgggacagtttatcatagcattcgtattgacgccactgttctaccggatgaacctggtatccatctatgaatatctggaaaatcgttttggtatgtcttcctatcggacaggcgcatggttcttcttcatctctaagatgctgggagctgcggtacgtttgttcctcgtatgcctgacacttcaactgctggtattcgaaccgtttggattaccatttattttgaatgtggccattaccgtagcattagtatggctctatacgttccggggtggagtaaaatctctgatctggacagattcactcaaaacattctgtctggtggtatccgtggttctctgcatcagttatattgcttccgatctcaatctgtcgcttagcagcatgatcagtacaatagccgatagtgacatgtcacgcattttcttctttgacgatgtaaacagtaaacaatatttcttcaaacaattctttgccggggcattcactatgattgccatgacagggctggatcaggacatgatgcaacgtaacctcagctgcaagaacttcaaagattcacagaaaaatatgattacgagtgttatatcacagttcttcgttattttgttgttcctgatgttgggagtattgctttacatcttcgctggtaaccaaggcattcaggtagaaaagagcgatgaactcttcccattgatagccaccggtaactactttcctgcaattgtaggtatcttgtttatcattggacttatttcttcggcttattccgctgccggctcagcactgacagctttaacaacttcctttacagtggatatcctcgggacaaaaggcaggacggaagaagaaatcgtaaagatacgcaagcgggtacatatcggtatggctgtaattatgggtatcacgatattcgtattcaacctattgaataacacaagtgtaatcgatgccgtatatatactggcaagttacacatacggccccattctcggattattcgcattcggtatattcatgaaacaacaggttcgcgacaaatatatcccattggtagccatcctctcccctatcctttgcttcatcctgcaaaagaattcggaagcctggttcaatgggtatcagttcagctacgaactgctgatattcaacgctctgttcacgtttatcggactctgcctgttgatcagaaaagataagaactaataattaacttaatacatcatccatgaatgtaagacttcattttttgttcactttgctcaccgcctccctgatcccccaaacgggaggcgcgcaagagcttccgacggatgtccgccaggaaatcggtaagtttctggacgcaaccgcacggaaagaggtttccgtagggcgcatccggattgactctgtcgccattgaagaaaatacgttgcaattattcgctaacatgaactgtgcatatattcctttccgggaagataatgtgacagagatttatcaaggtgtgcaggcactgcttccggcagagttttcaaaatacaacctgcaaatccgcacgaataagcgtagcattgaagaattaatcccccaagcactacgcagcaaaaaggacaaaaaagccaaaacattcaatccggccgggacaaaacctttagtaacggccctttctaccccctatacccctacaaatggactaaagaaccgtcacattgctttgtggcagagtcatggcttctattatgagcccaaactgacacgctgggaatggcaacgcgcccgcatcttccagacggtggaggatttatatacgcaaagttatgtactgcctttcctggttcccatgttagagaatgcaggagctaatgtgctgatgccccgtgaacgggatagccaaatagcagaagttgtcgtagacaatgacggttgccttcactcccgctccgtttatacagaaaagataggcgataagaactggatgcaaggtaccggtgaaggtttcgcccatctgcgcgatcaatatatcaattttgagaacccattccgtgaaggaactttccgcactgtcgagacggtaaaaggtaagaaggagaaagaaagtactgccgaatggattcctgaactcccgtcaaccggacagtacgccgtttatgtatcctataaatcattgccaaacagtacggatgatgccctttacaccgtttatcacaaaggaggagtctcccaattcaaagtgaaccaacagatgggtggcggcacttggatttatctaggtacatttggttttgatgccggaaaaagcaatgccggaaaagttgttttaagcaatcgttctgagaaagccggacgtatcgttaccgctgatgccgtaaaaatcggaggtggtatgggaaatatggcccgccgtatctctgatgcaggtgccacagagaatattaaaagttcggatggcaatgctgccatagtgcataaagaaatgccgaagatagattacccgtatgagataagcggttatccccgtttctgcgaggcagcacgctactggcttcaatgggcaggtattccggacagtgtttattccgacagccaaggtaagaatgactatacggatgattacaaatgtcgtggtatctgggtgaattaccttgccggtggttctacggttaacccgacagaacaaggactgaacatcccggtagatatggctttcgccttccattcagatgcaggaactacgctaaacgattctatcatcggaacactgggtatctactataccaacgtttacaatgaagaatacgccaacggagcatcccgctatctggcacacgacatgacagacctgattcagtcaaatatcgtacgggatatccgcagcctatacgaaccggattggacacgccgcggtatgtggaaccaatcctactacgaagcacgtgtgccccgtgttcccactatgttactggaattactttctcaccagaactttgcagacatgcgttatggtttagatccacgcttccgttttacggtaagccgtgcaatctataaaggtatgctgcaattcatttgctcgcaataccacatggactatatcgttcagccgttgcctgtcgacaatatggcattgaaaatggtaggcgagaatgaaatagaactaacctggcaacccgtagccgacccactggagccaacggcaaatgctgaaaaatatatagtttatacccgtatcggagatggcgatttcgataatggcgtgttggtagataagaatacctatcgcaccgccctccctgccggcatggtatgcagttataaagtaactgccgtcaacaagggcggagaaagtttcccgtccgaaatactctcagcaggacgtgcgtttaatagttataagcgattagcgatgagtgataagcagacaaacgctaatcactcagatatcgtgctgatagtaaacggcttcgaccgcatcagtgctccggcagattttgtcgcacctgttcccggagatactttacttgccggtttcttagatgatctggaccacggcgtaccttatctgaaagatatcagctacatcggtaagatgaaagaataccgccgttccattccatggatggacgacgatgcttccggcttcggcgacagctatggcaattacgaagataaagtaatcgccggaaacacattcgattatcccgctattcatggagccgccattttgaaagccggatattctttcatatcttgcagcgatgaaagtgtggaaaataaaacaatgaacctgaacgactataagtatgtagacctgatattaggtaaagaatgtcagaccaaaatgggacgtggcggtgtaaagccgttagagttcaaaacattcagccaacccatgcaggaagctatcaccgcatattgcggacaaggcggaaacatcttcgtctcgggtgcttatgtaggaaccgacctttgggacaatcgccttgccccggcacaggagtccgataagaaatttgcaacagaagtcctgaaatataaatggcgcgtggggcaggcagctacagagggtaaggtgaaatgtgtagcttcaccgttccccgccctttcaggcaactatacataccataatgaactgaatgcagacagttatgtggtagaatcaccggatgccatcgaaccggcaacaaaagatgcatacaccgtaatgcgctattcggaaaacaatctgagcgccggagtagcttacaaaggcgactacaaaacctgcatactgggcttcccgttcgaagcattgcgcaccgcctctgaaagagaagcgttgatgaatgccatcctgacattcttcagtgaaaaaactaattcattcaagcaataatatactaaaaccaatcatcatctatgaagcgaagacttttaataatgttcctgttgggctgcctgctaccgttcgcggtacaggcacaacatggcacattccgttttgcgcaaattacagacatccatttcagccccaacaaccccaacccgacggaagacttactacgttccgtcgcgcaaataaatgcgatagacagtatcgactttgttttggttacgggcgacatcaccgaagagggcgaccgtgccactatgctgaaagtcaaagagacattggatttactgaaagcgaagtattacgtgatcctcggtaaccatgaaaccaaatggagcgactccggttgtactgccttcggtgagattttcggcggcgaacgctttgaattcgagcataaaggcattctgtttctgggtttcaactccggcccgttgatgcgtatggcttacggacatgtcgttccgcaggacatccgttggatgacggaagaaatggataagtttggaaaagataaaccggttatacttgtcacacactatccgttactggatggagatgtcgataactggtatgaagtaacagatgcagtgcgcccctataacattcgtttgttcatcggcgggcactatcaccgtaaccgggatttgcgttatgatggcattccgggtattttgatgcgcagcaacctgcgtgataaagatggaaaaccgggatatggcatctatgatataacgaaagattcgatcctcgtctacacgcaacgcatcggcgaaccgaaaaagcaatgggccgctttctcgctgactcagccctattatgatcgtaatggaaaagcagagaaataccccgacttttcagtcaacacagaatacccgaatgtgaaagaacagtgggtagtgcaaaccggtgcaggtatctattgttcgcctgcaatagaaaaagacaaagtgttcgtcggagacgatatggggtacctgacttgctacgccttgaagaatggaaagaaactatggaatttccagtccggtaagcgcattgtaggtactcctgctgcggcagatggtatagtcgtattcggttctgccgaccgtaacatctacggtctgaacagtaaagacggaaaactgctgtggactgtaaaagcaaaagccccggtactgggtgcggtaaccattgaaaatggaattgcctacattggtgccagcgattctactttccgtgctattgatatccttacaggtaaagtgctctgggcatataccggtgtgaaaggatacattgaaaccaaaccattggtaacagccaacaaggtgatcttcggtgcctgggacaataccctctatgcattgaataaggcagacggcaaggaattatggaagtggacaggcggtttaacgcgcatgcacttctcacccgcagccgtatggccggtagccgcagaaggcaaagtatttatcaccgacccacaacgtgccatgacggctatcaatatagaaaacggagaaacagtgtggcgcactttccagtctatggtacgtgaaacaattggcctgtcggaagatggaacgcgtgtattcagcaagaccatgaacgacagtattgtctgctatgccacacagggagatcacccccgcgaattatgggcaagcaacgtcggcttcggatacgaacatgcaccctccatgcaagtggaaaaaggaggcgtaatgttcggcagtaccaaggaaggactgatctttgctttggaagcccaaaccggtaaaatcttgtggaaacataagataggtaactcactgatcagtaccgtagtgccgctgaacggacgacaggtattgttcactgctaccagtggcgaagtgggactgctacgagttaagaattaaagaattaataattaaaagcaatataggacattatgaataaaatcaattgcttcgttcctttttcaggagctgcacaagcggaaaagacagtaaaaggcctgcaagaaaccggcttagtgaataacatttatctgctcgccctaccggacgttacagaaaacctgcccggatgtagtaccctgcacatgcaatccatccagtccagtgcggccataagagacatagccggacatagcgatgcagaatatacgctgatctatacaaaatatacgacgctcgaactgggtttattcgccctggagcgtatgatacacattgctgaagacagcggtgcaggcatggtgtatgctgaccgctaccaggtaaaggaaggtaagcaaaccaatgccccggtgatcgattatcaattcggctcattgcgcgatgatttcgacttcggttccgtgctgttattccgcacagatgcattcaaggaggccgctgcccgcatgaatgaagacaaatataaattcgccgggctttatgaccttcgcctgaaagtaagccagaacgaaagtctggtacacatcaatgagtatctgtacagcgaaattgaagacgatacccgcaagagtggtgagaagatattcgattacgtggatcccagaaaccgtgaccgccagattgaaatggaacaggcttgtaccgagcatctgaaagaaatcggtggctatttggcaccagaattcaaacaaatagaattttcagcaggcaacttcgaatatgaagcttcggttatcatccccgtacgcaaccgtatccgcaccatccgtgatgctattcattcggtattgaagcagaagaccgactttaagttcaacctgattatcatcgacaaccactctacggatgggaccacagaagctattgacgaattcaagaacgacgaacgcctcatccatatcatccccaaacgcaatgacctgggtattggcggttgctggaacatgggtgtgcatcatcccaagtgtggtaagttcgctgtacaattggacagtgacgacgtgtacagcgatgaaaatacactgaccactatggttcgtgctttctatgaacagaattgcgccatggtggtaggtacttatatgatgacggacttcaatatgaatatgattgctccgggtattatcgaccataaagaatggacacccgaaaacggacgcaacaatgcactccgcatcaatggtttgggggctcctcgtgctttctatacaccggtgctgcgtgaagtgaaagttccgaataccagctatggtgaagactatgcactgggattaaacttctcccgccaataccagatcggccgtgtgtatgacgtagtttacttgtgccgccgctgggatgacaactcggatgcttcactggatatcgtgaaaatgaatggtcataatctgtataaagaccgcatccgtacctgggaactccaggcacgcgtggcgaagaataagagaagataaacactccatgcgttttccgcacttgtaccacacaagtgtttctcagatgaaatgcttgtgtgctacaaatgtaacgcaagtgtccctcacatgaaacgcaagtgttatgcaacacactaataagtaaccagttacagcattcaatatgaaccaaaccataaacaatctgcttaccgagcaacttgcctcctgggaaatggctcgtaacaactacgccgccctttcgggtgtgcaagtgaaggaactcgatgtaaacggtattccgtataaggtacagttcaatcctgcacgtatcgtttcttcgggagctaaagtagatgcccagtccatcaaggaacgcaaatgttttctctgcccggccaatttaccgccggcgcagaaaggaattccgttcgaaggacattataatatcctggtcaatccgttccctatctttccccgccacctgacgataccggaagtagcacacgtgaaccagcgcatagccgtccgtttcaaggatatgctggcattggcacaggcgttgacggattacacaatattctataatggtcccaaatgcggtgcatccgcccccgaccatgctcacttccaggcaggcaacaaaggtttcatgcctattgaaaaggactggcgcgaacaggtagcaggcaaagtggcagattacagtgaagctaccctctggtacttgaatgacgctccccgtgcgacattggtcatcgaagcagtcaataagaaacatgctgccgccctgttcgatatcatttatcactcactggacatcaagccgggagatgacgaaccaatgatgaatgtattggcatggtacgaagatgagaaatggatcgtatgcgtatttccacgtgagaagcaccgcccagcttgctatacagccgaaggagatgccaatttattgagcagtccggcatccgtagatctcggcggagtgtttattacaccggtcgaaaaagactttctcaagatcacagccgaagatatagcccagatcctgagtgaagtatcactttctgccgaagacttccatcgggtgcgtcagcgtattaaagagaagatataattaatgatactatttgagctctcccccgataacgggggagccggagggggtggagtaccctgaaagggggaggtggtaggtaaaattacaaaattcctatttctcatataataaagaatactattatcctcctaccaccccaccctaaagggcacccctcctcccaggaggaggggaatttgagatagtaatgcaatataacacttaaataagtatgaaagagcccaaagtacacgtaggcatattgttcgagccacaaatagagtttatcctgctgaatccgtaccgcatcaacggtatggaaatcagtggtaagcaggttgtgacctacaacgaaggcaggatactgtggaacggacgcctttatgacgaacttctatttgaacctgtaaacgaagccaccgacgctttcgaactgctcgatgtcaccatcggcatcaacttccactgggagcgtaaagaagaccagcgcttcctgggttctctgaagattattgtggagaacaagaagctgacaggcatcaacgtcattcacgtagaagattacctgactagtgtaatctccagtgagatgagcgcaacggcttcattagagctgttggaggcacatgcagtaatttcacgaagctggcttttggctcagattcataagaacaaggagattacggaaacccagactgagtattccgctttcacccaaacagatgaagagttaatccgttggtacgaccgtgaagaccacacccgtttcgacgtctgtgcagacgaccattgccagcgttaccaaggcattacccgcgcctccaccgaaatcgtaaagcaagccatcgctgccacccgcggacaagtattgacatccgacggtaagatatgcgatgcccgcttctctaaatgctgtggcggtgcattcgaagaattccagtattgctgggaagatgtgaagtatccctatctcctgaaacaacgggatttccgtatcttcagttccaaattcaatgacttgagtttcgaaaacaccttatccggtagcggattaccagatctgaccgacgagcaagaagccgagacatggatacgtacttctccacccgctttctgcaacaccacagacaagaaagtcctctcacaggtattgaataactatgaccaggaaaccaccgacttctatcgctggaaagtagtttacacccaggaagaactttctgcactgattctgaaacgctccggcatcgattacgggcaaatcattgaccttgttcctattgcccgtggaacttcaggtcgcctctggaaactgaaaatcgtaggaaccaagaagacgctcatcattggcaaagaactggaaatacgtcgcacactgtccacttcccatctgtacagttccgcattcgtagtagataaggaagacgtctctcccgaaggtatccccgcccgtttcatcctcaccggagcaggctgggggcacggtgtaggactatgccagatcggtgctgccgttatgggcgaacaaggctataagtatgacgcgatactgctgcactattacataggcgcaaatatcgagaagctatatgagtaaacagaaataagaaaataccatgaaacaatctaccaagaaaaccagtccgtgggcatggatacctaccctgtactttgcacaaggtttgccctacgtagccgtgatgaccatttccgtcatcatgtacaagcgtttgggaatatccaacacggatatcgctctctacaccggttggctctacctgccatgggtaatcaagcctttctggagtccatttgtcgacttgatcaagactaaacggtggtggaccgtcgtcatgcaatacatccttgcctttgcattggcaggcattgcattttccatccccactccctttttcttccaattgacactggcagtattctggatagtgggcttcacctccgcaactcatgacattgcggcggatggattctatatgcacgccctgacggagcatgaacaatcgctctacgtgggcatccgaagcacattttaccgtattgccacggtagccggacaaggcttgctggtcatcattgcgggattgattgaaaccggaaccggtctcgaacctgccatgctgcaagttcaagcctcaccctcttacaccaacaccctggccttgcccgactttgaggatacgaatatcgacacacaaaaagaagcctatttcgtatatacctctccgatagtacaagcaggtgtcaccgctaccgctgatcatgactcggcagatataaagacacggattgccgaattggaaaaagcggtcaaagcatccaacatagccaaccacttcgttccggccgaggaagccaaagaaggcgatgccaccgtaaaagcagagaaaaaggagagcactttcaccgcatgggtacgtgaaactttcggcgagaagcgcaaagtagccgaaggtgctgttgataacgttgccatagtaggcgtacgtctgtccaagcaaccatctgccgatgaaaccaagatattgaatgtcaccttcaaagacggtgaccaaagtatcaaactggaacagaacagcctttccacccggttcgaattcactgccgagaactgggacaagcctgcttacctactgttcagaatagatcataagattaagaacgagacttccgctaccttcgaaggtgcatccggtaacattccgtttgcctggttgatagtattcatcgtactgtccggattcttcttcgcggtgagtatttaccacaactggatattgccgaaacccgcatccgaccgtccgtcgaaagacgttaccgcccagaatctgatgaaggaattcttcgatactttcaagagcttcttcaccaaaccgcaggcaggagtcgctatcctctttatgttgctctaccgcctgccggaagcacagctcgtgaagctaatcaatcctttccttctggacccaatagacaaaggcggactggggctgactaccggacaagttggtttcgtctatggtactatcggtatcatcggactgacaattggcggtatcattggcggtcttgttgctgcacggggcggattgaagaagtggttatggccaatggcatggagtatgtccctcacctgtctgacattcatctatctgagttatgcacaggatcactcgttgctgacagtcaacatctgtatcttcatcgaacagttcggctatggtttcggcttcacagcttatatgctgtatctgatttatttctcggaaggcgagcacaaaactgcccattacgccatctgcacaggattcatggcactgggaatgatgttacccggaatggctgccggatggttacaggaaaccatcggttaccggcacttcttcgtatggaccattatctgttgcgccgctaccatcggagtatgtgcgttcatcaagatagatccgagcttcggaaggaagaaagaagagtgataaaaagtgataagcggtaagtgataagcaagaaatcataaattataaaccatgaagaaatacattctcctttgcctgctctgtgtgctctgttgtgcatcgcaggcacaaaagataagaataaaaacaggtatcgaagtcctgaaagaccaaaatttcaagtgtctggaaggtaaacgcgtaggtctgataaccaaccccaccggagtggataatcagatgaaatccaccattgacattctgcatgaagcaccgaacgtaaatttggttgccctcttcggtccggagcacggggttcgtggcgacgtacatgccggcgaccacgtgacggacatcaaagatgccaccaccggattgcctgtatattctctttacggcaaaacccgcaaggctacgccagagatgctgaaagacattgacgtattggtctacgatatccaagatatcggttgccgctcatttacctatatcagtacaatggggctggctatggaagctgcggccgaaaacggtaaagaatttattgtattggatcgccccaatccggtaggcggactcaagatagaaggcaatctggtagaagatgattgcatttcttttgtcagtcagttcaagattccgtacctttacggactgacttgcggtgagctggcattgatgctgaacggagagaagatgatggcatcacaatgtaacctgcacgttgtgaagatgaaaggctggaaacgcaagatggactatgtacagacggggttgcaatgggtaccctcttctccgcatattcctcatccgcactcggctatattctatccggtaagtggtattctgggtgaactgggatacatgtccatcggggtaggctatacgataccgttccagatgtttgccgcacagtgggtagaagcagaaaaactggcgggaaacctgaacgcattgaatgtgccgggtgttgtattccggccgatgtatctgaaacccttctactccgtaggtaaaggtgaattgctgcaaggcgtacaggtacacatcatggatgtgcagaaagctccgctgagcgacatccagttcctggtgatgcaggagatcgcagcgctctatcctgaccgtgccgtatttgagcatgccgacaagggacgttttcgtatgttcgacatggtaagcggctcggaagagatacgcaagcgattctcacaacgcaaccgctgggaagatgtgcgcgactattggtataaagatgctgaagacttccgacgattgtctaagaagtactacctatacaagtagggaacaataaacgcttcttacactgaaaaagtcataaagacatatgtatgtcacccctcatgagatatgtatgtcatgggtcatgagaagcccatatcatgagaggtgagatacgcttctcatcacaggagagaccgggatgtcattaaaacaatcctacagcacattctgacgggggtgccggtgaaagaagaaaagaatgataaggaaaagaaaggcgaaaacactatggtaaaaagtagctacacttcgtttttgcaggaaataaggggacttattccgcaagataggatatataccgacgaactgcgccggttggcatggggaacagatgcgggtttctaccgccttatcccacaaatcgtgattcgttccaatagcgaagaggagatctccgacctgttaagacttgccgaccgttacggtctgccagtaacgtttcgtgccgcaggaaccagtttgtcgggacaagccattagtgactctatcctgatagtagccggaaaacattgggagaagtacagcatttctcccgatcatgaacagattaccttgcaaccgggcatcatcggtcagcgggttaacgagattcttgccccctacggacgtaagtttgctccggacccggcaagcgtgaaaagtgctatggtaggcggcatcgtcatgaacaacgcctcgggtatgaattgcggcacacatgccaatagtgacaaagtgcttctttccgcccgcatcgtattggcggacggcaccgtgctggatacaggggatgatatttcgcgtgcttccttcgaagccacccaccccgatttctacaatcgcatctgcgaactgcgggaccagatatgtgccaacgaagaactcgctgcacgcatccgctacaaatactccatcaagaacgtaaccggattgaatcttctgccattcgttcgcttcgatgacccgttcgatattattgcccacctgatggtaggctcggaaggcacgcttgcgttcctttcccagattaccatgcgcacagagtacgactatccgcacaaggcaagcgccatgctctattttaccaatatcaaggatgcctgccgggcggtggtggcgatgaaggagttgacaaatcgtaattcttcatccccgtcatccgtgccatctgcggatgaaaaattagtaaaaggcgccgaactgctggactacaaaagtctatcttcggtagaagaccctatctacttaaagtataagcaggaagttgccgatgcctccggcctcacagccgtgctgaccgagaccaaagcccgcacccgcgaggaactggaacagaacatctcagtaatcgaggaatgtctgaaaactttcagcacctacatccccgtgcacttcaccgaccggccggaagaatattctaagtattgggctatccgctcaggtatattcccctccgtaggtggtacacgccaacccggcactacctgcctcatcgaggacgtagccttccacatcgaagacctgcccgaagccactgccgacctgcaacaactcatcgcccgccacggctacgatgatgcctgcatctacggtcatgccctggaaggcaactaccattttatcctgaaccagtccttcagtaccgacgccgatgtaaagcgctacgaggacctgatgaatgacgtaaagactctggtagtcgataaatacgacggttcgctgaaagcagaacatggcaccggacgtaacatggcccccttcgtgaaatatgaatggggagaggcagcttttgaagccatgaaggcagtcaagcagttgttcgacccgaaagggctgctcaatccgggagttatcttcaatgatgacccgcaatgccacatcaagaacttcaaaccgttgccgttgattcctatcgacgaagccagtcctgccggaaaagtaaacaagtgcatcgaatgtggcttctgcgaagtgaactgcctgtcgtgcggctttaccctttcttcgcgccagcgcattgtactgcaacgggaaatatcacgtctgaaacaaagcggtacagacccggaacgtctgtctctactcgaaaaacaataccgctacccgggcaatcaaacttgcgcaggagacggactgtgctccatgtcttgcccgatgaatatcaatacaggcgacctgacccatatcatccgccaggaaacgctaccgaaaggtagcctcggatataaagcaggagatttcgtagccaatcacttcgccggtgttaagagtagtctgcgccccgttttatcattagccaatttcggacactccgtattaggaaccaaagtcatgagcagcattacgaaagggatgcacaatgtattgggcatacctttgtggacgcctgccatgccgaagagctataaagtgacaagctacaagctacaagctgcaacagatatgagtgacgagctacaagctacgagtactatgcagaatgatagcgcagcactggtagcttgtagctctgtagctcgtaactccacagctgacaaagtagtttatttccccagctgcatcaaccaaaccatgggactcccgaaaaaatcccccgtggagcaacctttggtaaacaagatgatctccctcctgcaaaaaggcggttacgaagtcatcttccccaaggacatagataagctctgttgtggcaccatctgggaaagtaaaggtatgctcgacattgccgatcgcaaagccgcagaactcgaagccgccctttgggaagccagcgagcaaggcaaataccctgtcctctgcgatcaaagcccctgcctgcatcgcatgcgcgaaaccattcaaaagatgaagctctacgaacctgcagaattcatctacactttcctgcgagacaaactggtcttcacgcagaccgaccgccccgtagcagtacacatcacctgctccatgcgcaaaatgggactggcagatacaattgtttccctggcaaaactctgttctacgcatgtcttcgtacccgaagaagtaggctgctgtggttttgccggcgaccgcggattcacctatcccgaactgaattcctatgccttgcgcaaactccgtccgcagatagaagcatccggcatcactatcggctactccaacagtcgtacttgcgaaataggactgactaccaactcaggtatcccctacgtctctatcgcctatctcgtagaccaatgtacgaagggaattgacaattgaataaataacttaacacacttattacaatgaacagtcagaccaagacaaacaagcgcattcttgccctcgacatccttcgcggtgtcaccattgcgggcatgattatggtgaacaaccccggcacttggggacatatatatgcccccttgcgccacgctgagtggaatggcctcacccccaccgatctcgtcttccccttcttcatgttcatcatgggtatctctacctatatctccctgaagaagtacaatttcgagttcagtcatgcagccgccatgaagatattgaaacgtactattatcatcttcctgatcggacttgccatcggctggttctccagattctgttactactgggcaggctcccatgaaggtctcagcttcggcgaacaactctgggcatccgtctggactttcgaccgcatccgtatcctgggtgtcatgcagcgcctggccctttgctacggtgctaccgctattattgcgctgaccatgaaacaccgtcacatcccttatctcattgccacattgctggtaggctacttcatcctgctgatgtgtggcaacggatttgcttacaacgaaaccaatatcctctccatagtggatcgtgccatcctcacccccgcacacatgtacaaggacaacggcattgatcccgaaggtcttttaagcaccatcccatccattgcccatgtattgctgggcttctgcgtgggtcgcatgatgctggacagcaatagagccgagagccgcgaagccttactgaattctcacctgatcaaattatttctggttggtgccatccttacttttacaggcttcctgctgagctacggttgtcctatcaacaagaaaatctggtctcccaccttcgttctcaccacttgcggactagcctccagtttcctggcactgctcatctggatcatcgacgtaaaaggatacaagaaatggtgcactttcttcgaggctttcggtgtcaaccccctgttcatgtacgttttgggtggagtactaagtatcctgttcggcagcatcagcttcccttggggcgatggcagcatcagcatacacggattcttatacaagatcgttcttatgccgatattcggtgagacaggcggttcactggcctatgcactgctctttgtagccatcaactggtgcatcggctatcaattgtataaacggaagatatatatcaagatataggagatataagagataaaggagttatagaagttaaagccgatacttctgcttataataaaaagactatcggctctaactcccagcgaagcgataactcctctaactccttaaaacaacaagtaaataattaaacttaaaacgatatgatattaatagcagacagtggctctacaaaaaccgattggtgtgttgtagagaaaggtaaactcatccagcagatttctacgaaaggtaccaaccctttctttcagtcggaagaggagatcagtaatgaaattgcgacagcgctgctgccccagttaacgaccaatgccttcgacgctgtgtacttttatggtgccggctgtggcttccccgacaaaattgccatggtacaccgtgccattatccagcatctccaggtttcgggcgacgaagtggaagtaaatacggacatgcttgccgccgcccgcggactttgtggacacgaaccgggcatagcctgcatcatgggcacaggttccaactcgtgttactacgacggcaaacacattggtgccaacgtctctcccctgggtttcattcttggcgacgaaggtagcggtgcttgcctgggtaagttgctggtaggtgatattctgaaaaatcagatgactccagaactgaaagagaagttcctcaagcagttcaatctggaaccggcagacatcatcgaccgtgtataccgtaaaccattcccgaaccgcttcctggcaagcctgtctccattcctcgctcagaatctggacgagccttgtgtgcgcacgctggtgctgaacagtttcaaggctttcctgaaaaggaacgtcatgcaatacgattatcagcatagcaaggtacatttcatcggctccgtagcattccattataaggaggtacttaccgaggccgcacaggaaatgggcgtccaaataggcaccatcctccagagccccatggaaggcctgattagctaccatagctaatcaccccagccccataaatcataaattataaatcataaatctcatcatcatcatggcattcgtaaaaatatcagagcaaccttcgctctacaacgacttggaaaagaaatctgtccgcgaaatattggaggacatcaacacagaagaccagaaagtggcattggctgttcaaaaagccatcccacagattgagaaactggtgacacaaatcgttccgcgcatgaagcaaggcggacgcatcttttatatgggagctggcaccagtggtcgcctgggtgtgctggatgcatcagaaattcctccgacattcggtatgcctcctacactcgtcatcggactgatagcaggcggtgatacagctttgcgcaacccggtggaaaatgcggaggacgatatacgtcgcggttgggaagagctagttgaacgtaacattacggataaagataccgtcatcggcattgctgcttccggcacgactccttacgttatcggcgccatgcagaaagcacgtgagcacggcattcttacaggctgcatcaccagtaaccccgactctccgatggcggctgaagcagatgttcccatcgaaatgattgtaggaccagaatatgtaacaggaagctcacgcatgaaatcgggtacgggacagaaaatgatactgaacatgattaccacttctgtcatgatacaactgggccgcgtgaaaggtaataaaatggtgaacatgcagctgagtaaccaaaaattggtagaccgtggcacccgcatgatcgtagaagaactgggattggactatggaaaggcaaaggcactgttgctaatgcatggttcagtgaaaaaggcagtagatgcttataggggggtaacattatgaaactcctcccttcctttttcttcattgtattgcttgccctgcaagccaatgcacaatccttgcaacgtgttgcccccgaacaagtcggcatggattcccgtcatttgttgtacgctgacgaagcgatagaaaccgccatcgccaataaagacattcccggtgccgtactcgctgtagtacgtaacgggaagatggcctacctcaaagcatacggcaacaagcgtgtgtaccctaacaccgagcctatgactgtaaacactattttcgatatggcttcatgcagtaaacccatgtccactgccatctgtacccatatcctggcagaacgtggtaagctccgtctcctggatcccgtcagcctctacatacctgaatttaagtcctgggtgagcgaagacggaaaagataagaaaatcatccgcatcgccgacctgttgacacatacttccggtctccccccttatgccccaaccagtgaattggaaaaacaatatggctcccccagccccgacggaatgatagagtacatagtcaactgccgccgcgacttcaagccgcagaccgacttccaatacagttgccttaactacatcaccctgcaacgcatcatcgaaaccgtcagcggacaatccttacgtgacttcgcccgcgaaaatctatttgatgtattaggtatggcccataccgactatctcccctgcaagcgcgacaaaaacggcaaatggataaacaccgctctcccccactgggcagagaagaactctcaactctccactctccactctcaacttatcgaagtcgctcctaccgagaagcaatccgacggcagcgtcctctgcggacaagtacacgatccactcgcccgtgtcatgaatggtggtatttccggcaatgccggcgtattctcttgtgtcgaagacatagctgtactctgcgccgccctgcaaaacggcggagaatggaacggacaccgcatcctcagcccattgggagtaaaagctatgcgtaccgtcccccgtgccactgctacattaggacgcactttaggatgggataatttcaccgcctacgcttccaataacggagattattttggtccgaatacctacgggcacaccggatacaccggtacttccatcatcatagatccggacaacgatacttccgtcatcctgctcgtcaatgccgtgcatcccgaagacggtcacagcatggttcgtctgcgctctctgatagccaatgtcgttgcagcttctatctatcccaccccacgtatttatacggatcattattataagcgcttcctccaattcatggatgaacctgccattacctccaaagatatcgtcatggtgggcaacagccttacagaaggtggcggcaactggaacacccgcctcaacaagaaaaacatccgtaaccgtggtatcatcggtgacgaagttatgggtatttacgaccgtctgcaccagatacttccgggacacccagagaaattattcctccttgccggtgtcaatgacatctcacacgacctcactgcggacagcatcgtcagtatgatacgcatgaccgtagagcgcattcagcgtgaatctcctgatacgaaactctacctgcaaagtctcctgcctttcgatgagagcttcggacgttacaaaaagctaaccgggaaaaccgacatggttcccgaaatcaatgcacaactggaagttttagctaaagatcacaaaattacattcatcaacctcttcccgttatttacagagaaaggcacgaatgcgcttcgcaaagaattgaccagtgacggcttacacctgaatgaagaaggatataaaatttgggtgaaagcgttgaaaaagaagatgtagactcccctataaacacaagaggctgcccataaatgagcagcctctctatctattttataaagagcctctactttactgcctctaattgcatatcaaatgtcaaagttgaataaccaagaattgaactatatccgctttctccatatccacattggtaaggaatatacaatatccagcgttctttcgtatgcatatattgcaatactgtagtccatccagaaacgacacctgtcacactaaaagaagatggagaatcaaagtccgtaggcaccttggcgccctcgccttcagaaagcagtacgccgcggtctattgcgctgtaaccaacaaaattaccatcgaatctatcccccagtattattgtaccataatagtatgtcgtaactgactgcgtataaagcggacgctccccatcgggattgtctggcgatattttcttacaataaatatacaaagaattctctgttgtactcttgtagttatccttaatagcaaataattcacctacaggaatcttactaagcttaacagagtcaccgttatcaccttcatatttcgccccttctataattctatcagcccggccacctatgatcagattcaatgaatcaatataagcttcattccgttctcgccagttgtcatacctacctacttcctctacttcttcacaagaagtaaatacacctgtcaagagcaacaggaaaggtagaaatactaagagtcttttgttcattctattaatttattgtattacttattgcaaccccttcagcaacgaagtgatgctaacacgatctgcaatgatgttattcagttcagcaatagccacgcgttcctgttgcatcgtatcacgattacgcagcgtcacgcagttatcttccagagtttggtggtcaacagtcacgcagtacggagtaccaatggcatcctgacgacgataacgtttaccgatactatctttttcatcatattgacagtggaagtggaacttcaatgagtcgatgatctcacgagccttttcaggcagaccatctttcttcaccaacggcattacagccaacttcacaggagcaagtgcggcaggcaatctcagtactacacggctttctccactctccagttgttcttcgcaataagaagcagacatgatactgaggaacatacggtccacaccaatagaagtttccacaacaaacggagtataactttcattcgtttcgggatcgaagtacttaatattcttacctgagaacttctcatgctgcgacaagtcaaaattcgtacggctatggataccttccacttccttgaagccaaacggcattaagaactcgatatctgtagctgcattcgcataatgagctaacttatcatgatcatgataacgatagtggtcatcaccgaatcccaatgccttatgccatttcaaacggatttctttccatttcttgaaccattccagctcagtacccggcttcacgaagaactgcatttccatctgttcgaactcacgcatacggaaaatgaactgacgggcaacaatctcgttacggaatgccttaccaatctgtgcaataccgaaaggtatcttcatgcgaccggtcttctgtacattcaggtaattcacaaagataccctgggctgtttcaggacgcaggtaaatcttcatggcaccatccgaagtagaacccatctctgtagagaacatcaggttgaactgacgaacttccgtccagttctttgtaccgctgatggggcaaacgatttcttcatccagaataatctggcgaagctcgtcaaggttattatcattcagagcctttgcaaaacgttcgtgcaatgcgtcgcgtttagcctggtgttccaatacgcgaccatttgtgctacggaactgcgcttcatcaaaagcctctccgaaacgcttggcagctttggcaacttctttattgattttatcgtcgtactttgcaagttggtcttcaatcagcacatcggcacgataacgtttcttggaatcacggttgtcaatcaaagggtcattgaatgcgtctacgtgtccggaagccttccagatggtggggtgcataaagatagcggagtcgatgccgacaatgttttcgtgcagcaacaccatgctctgccaccagtattgtttaatgttgtttttcagttccacacccatctgaccgtagtcatacactgctcccaatccgtcgtagatatcgctggaggggaatacgaaaccgtattccttacagtgtgatacgagtttcttaaaaacgtcttcttgtgccatttttttgttatatctattaattttaatcctgttctttattaaaaagcgccacaaagatagggatttatatcataagtcgggcaggtggggtattaatttatcttatcgttgcacgttgttacacaaactgatgcacaggaataacatcaatccaaccttcttccgcacgaattttatcctcctgattaagagttatgagaatccccttatcctttttaaagaaacgcatggcttcgcgcaatcctcccacttcacgtgattcattttcccgatgcagctccagacagacctgaataagcagtatcggtacattcttctcacataccacaaagtcacattcactattattctcactaaaataataaagttgccgataacgacggcgcaactcccaataaactacattttccagcatatgccccgtatttccggtaaaggaaacggtaacagcttgcgaaagggctgtatcaatgaaatatattttctgaggattgacatattgtgctttcaatgaccatgagaacttaggcatacgactgatgaaataagcctcttcaaaatagctcaggtattccaaagccgtcttaccggtttttataccgaccattcctgccagtttattagctgaagcaaggtttccgaaattagctgccagataaagcaataatgccttaagggaaactacatcacgaatcccataacgaactgctatatcccgatacaaaatatcatcaaacaatgccgtaagtacatcctgattaccagtacgtacaaactccggaaagccaccatcccgaagatactccataaaagattcagcacaaggtgtcaatgaccggaaacggaggaactctttatacgacaatggataaagttccttcgagatatgtcgtccggtaagctttgttcctaattccctactcagcaaagaagcattggaaccagtaatacaaacattgaatctctgatccagtttctgtcttacatataattcccaaccttccaccacttgaatttcatcaaaatagagattccttttacctgtttcgtctatcaagaggtcaagtaattcaaagtctttgatatcaaaacgaaacagttttggggtatcaaaattcaaatagaaagcctcgtcgatagttggtcctacatgctgccgcatcaacgtactttttccacaacgacgtatccctgaaatcactaaagcatgatttgtattatctacaggcaatgtcgccaataactcgcgcgaaagagattcatcatgcttaaagaactcctgctgttgattataaacctctttgatatcagaaaatttcaccatacgtctatttatttgtcatagagcaaaggtagcttatttattgctaataaacaaatccaagtattagtaatattcaaatcttcatattactaataaacagtttaaacttagtttttatcagggcaaccgcatcaaattttcaatattttcttcagatattctatatccaatgccacttttatagcctcttctttaaacttaatttgtctttctgctctgagatgatatgcaaagccatttttcttagcaccgttaccccgtgtggttggggagacgtcacgtttctttttaccgtctatgactatttgtttctccgatagttcagataagatggattgtccatacgaacgaaggcagtgttcaagttcatccggacaaatacccttaaaaacacgttcaaaggtgccttcaaaagggacaccattagctaaagacaacaccgtacccgagacgtatctgagccgtacttgctccgtacgttcttcggtcagaagtacctctgagcgaagaaaccacggacttggtacggagcaagtgcattctgggtactgtccgggtaccttttgctcctgtgatcagcagtgcatagctcagcacattgcgcgcattcatttccgctttgcattgcgcatcataggcttcatcaccatccagattggggacacccgcccattccccatgcgtaaggataagtcatatatgtgtacgaatatcctttttatgaaaagagagtttatcactgattatcaagacattacaaagtctcaatttcttgtcaacaagaaattaggagtttgttggcaagaagttaacttcctgtcgacaaactcctaacttcttgtaaaaggagaaatagcggatttttcggtttccttacactgcctgattgataagacgaatatgttatatgtaacttgtacattacttgatgagaataatcattgcttaatgagctgtatttgcgcagcgggttgtccgacacaagctccacggggaggtattctatttcttccactgcctgaccgggctccagcggcagcagtgcgttgagcaggctcttcacaagatcggggtgttcgccgaagacgcgcttgaacgtcaggccggctttggggtctaagtatctcatgcgattatggttctatggtttaacaagttctttgtgcacaatcttaatgcaaaaataatgcatagatttgatagtcagcaatctttcccgacaattattataaacgtggtgttctgtcactgaacctcattataaaatctttcgaccacttatgattgcaaatccagcggaacgggggacagggaaacattttctttgttgtacatcaaaacctggttctgagattttcccacataatccatcaaaaagtcattatatccagttttaagaacaaataacctgttttttctccctttttcaagcaacaaatatcacatataagtcctaaaaccaataaaaagtaaatacattttaaatttcgtaacggaaaaccattactttgtccagctttttaaattttttactactaatttaaagaatatttcgtaaaaggggtatctcttatgaaataaatacataagtttgtagagtcaacaacagaaaacatacgatggaaacaccatatacgaaaagtagcgataaaatcttatttgagagagatatccaagatatcctcccagaacggagagttcatgcaggtaaagaagaggagactcacgcttcctgcagaatgaaagaaatatacgagaacattttatactgcatagagaataaaatgatttacttggatacaacgattaatttaagtaaattcagtcttttattgtgtactaacacgacttatctttcaaaagtaataaacatattctttaaatgtaatttaaaaaccttattaaataagtatcgcatagaatatgccaaagaactgctgaagatggagcattgtgacctcaaaaccctacccaaaagatgcggttttgcttccagaagttctttttatgccgctttcatgaagtacgagcatatagcaccaatggacttcagagcacactatatgagcatagaaatcagaaaaaaaatagatatggaaatagataatttattaaccatttagtaattaattaatcaaatttttattgttatgaaaaagtggacttacttagtcgcagccggcataatgctgggagcgacgccggtatttaccggatgtattgacaatgatgagccggaagggatcaccgtattgcgtggcgcaaaggctgaactgctgaaggcaaaagctaccgtagaaactgcaaaagcggagcaagtgaaggcaaaagccgcttatttactggcacaagctgaatatcaaaaggctcttgctgcaacagaaaacgccaatgcaaaaatcaaagaggctatcgccaagcaagaagaagcaaaggttaagttgattgaaactcaaaacgagcaggaaaaacaaaaactacaagcccaaatcgcagaattggaacaccaaaaagagatgtgggaaattgaaaaaaatagtgctatagctgctgcagaacaagctgtgaaaagctgggaattagcatataagcaagcagaagtagcatatgaaaaagtgctgttggaactcgctgcacagaaagcttcactcacaaagcagcaacagcttttgttggctgattacgtcaatgatgtaaagactgccaaagaagatttagctgagaaaaaggaagatgtccgcttagcacagcgtgctgtgaataaggctgcacagttggtggaagaaaccgaagctgacaaggaatactggcaatacgaattggcacgcactttgaaactggaaaacaagaagttggaaggtcttgaagcggctttaaaggaagctaaagaaggattaggtgaattcgaaaacatgaagcctacagaacttgccgctaagtatgaagctctggaacaggaactcaatgctctgaagaagaaaattgcagatgagagcgtaaaggctgctgaagaaagacgtgctattcaggaaggggaattggctgaattaaacaaaaaagctcaggctatgactaaaagtatgcaggcagatgtcgaaatcccggcatttacttatcctgaagtgataggtgacgctttgcctttcgcttggaataatatcaaagataaagaatatgagcctctgacatacacatggatgaaccaatattattataattatagattagaggaactgaatacgttattaacacaggttcagcaatggactcgcgatgagaacgacaatgagtggacacaacaacgtattgcagagtggaagaaagatattgaagatgcaaatactgctatcgaaggtatgaagaaagactggaaagaagcagtagatgtttatcatcggactccggctgatgtagttatcaatatgagtaagattaccggttacacagaagctgttgctgctattaagccgtttaatacagccgtaacggattatcaaaaggcatggaaggctttcgaggatgcacgcaaggctcatcaaaaagtaacaaatgaattttggaataataggaataatatcaactatacatataatgcggagtataacaaactggatccatacacaaaggctgaagaggaaagaacaaagctatacgaagcttggaacactttaaacagtaacccagatgccgaacaggcaaaaaaagatgaagcttggaaggcttatacggattttgacagcaatgcttacgtagcagaattgacaaaacctcttgaagagaagcgtgatgctgctcttaaagcagaagatacaaaacgtttggaagctgaagctgccgttcgtactactgtagaagcatataaagccaagagggatgcacttactgcagaggtagacattgtaacaccgttatatgataatttctatacgaacgcttctcgtattgatgagtggactacatatcagacaatctataaccacgcaaatttcgcagaagcagcaggactttaccaaggttctaatgacaatagctactatattagcggatggaatgatgcagatggtaattatattaatagtgaatgggtttactacccaaataatgtttccacatatgaagtagacgctgatgccgtaacagaaatcagcaaagacaacatcaaaacgctgattcagtacagatcacgagcactgttcggtaatgcttatggctttgggcagaatgaatacggtgaccctgatgcacgtttgcttgatttaacttttgaagatgtagaaaagttgattgctgaaagcagtgaagagcctttgtacggaaatgattatatcactgcatgccgtcaatttggtagaatgggttcagtatttgcttttgaagctcaagtgaaatttgctgaagcatggttggctgacaagaacagttctgttagcaagttgattagcgcaactgaagaagctattgaagccatgcaagccaagtatgacgaacaagaactcagctataaagaacaaggtgaagcattagataaagaacttctggctattaacaaaaaacttcaagatgctgttgacgcactcaacgaactgcgtgctacttctggcccgatttacgatttgaaagaagctgtttggcaagctatcaaagactatagagatgcaggtttcgatgaatggagccaagaccttatcgacagagaagttacgaagttgaaaactctaatcgagcaactggaagcatcaatcgatgaccaaaatcatgctatcgaaacagctcaacgcaatctggatggttacaacaatggtaacctcaccgctttgcagactgcaaaagaagcgttggaagatgcagaagctgccatggtagccgcacaggaggtttacaacgatgcattggaagctctgaacaagatgattgcagctatcgctgcggaaactgctgaataatcggcaatgctaaatttaaataacaaaaagatgattagaaaactttgcacaatcttattgttagctgcctttgttgcgcccgcatgggcgcaacaaacccgcggcgacaaagagggtgtagtgtttgctccccgcaaaggtcagtggcaggtgtcattggtattaggaaatagtgggcaatcgtacaatgataacgtcagctaccttttacccaaatacaccaacacagaaggctcgataggacttccaaacggaggaacagatgaatcgggcaatctgaacggctacttgaacatcagcggactcaatgacaatagcttaatcaacatcgccggtctgcaagccaaatacttcgtaagcgactgttgggatatcaacttctctttgggcatgaacatcagtatcaccccaaagaaggactatttagagggcgactatgaatctgtgcccgacataattatcccagctcaaaagtatgtaaacgcgcaagttaccaataactggtacgtatcggtaggttcaaaccgctatttcaaaacgagcaatccacgcatacacccatacataggagccgtagccggtttccagatggcgcgtatcgaaaccacggaaccctatacaggcaaaacgtatagcgacggagaagacgaagacagtgaagaaggacttccggaacacgtctacctggcagcaggaaaagccggacagatgttcggcatcaaaggcgctgccgtagcgggactggaatactgccttgccaaaggtatgattgtcggcctggaactccagccggtagcttaccgctacgacgtgatacaaatctgcccgaaaggtttcgacaaatacagtataggacaccacaacatcaagttgtttgatatgcctgtgctgaaactcggtttcagattctaaaatgaaggaacagcgttaagccaaagacttaacgtatgtaatgcagggaaggcggttctgctaacacgattagccgaaccgcttttattataaaaaccagttatataatgaagaaatatatttcacttttatctcttgtcgtcatagcaataggatggactgcttgttcggaaacttctaacggtccgggttgccgcatcaaaggatatctttcattcaaggaatataaaaaggtatacctgacagacaattccgagaaccgcatcgatagttgtgaagtcaaggacggacgcttttatcttgaagaaaaaggcaacatcagcgaaccgtatgtagccatcatacacatgacagcagaacaggattccaccgatcagctcgatatgccggttgctatagaaaatggcaccataaaggttgaactgggagaatatatcaaattatccggtactccactgaacacccgaatcaaagaatttcttgacgctttgcagcattgtaaagacggagtcgtttcaaaaacggacattacaccggaggaaatatctgagatattttcacaattctacaaacagcagattttatccaacaaagacaatgctgtaggagagtacatctatcgtaactatggcgtacatctgaataccgatgacaataaacaggtaaaagcacaaatgggtaactaaaaacagtgtactatgaaactcaaaattatcattaccaccatggcactgacagcagtttgtctaggtgtccatgcacaggaaaagaaaacaaatccgaatccgtggttcgtacaagggcaaatgggagcctcctactctaccggagacgccgatttcggaaagctgatagctcctaccggagccatcgccgtcggcaagtatttctctcccgtatggggagcccgacttgccatcagtggctggcgtggacgtgtaggttcggaaatcagcaaacaggcccacggtttctattacggcgcagccaccgtagacggattgatgaacctcagccaactcatcaggaaatatcccgaacgattgttcgatctcagcgttatagccggtataggtttcaaccgcacttatagccacagcgtcagcagtttcatgggacgcctcggcttgcaaggagctttgcgactgaacgatgctctggacttcaacatcgaagcactcgccaacggcgtttccgatcgctggaacgggcgggatgatcactctttcgatacttacttcaccgtatcactggggctcacttataaattcagaaccggctataaatgcatcacctgcatatccgaagagtatcctgaagtgctctacaccgaagaagaagtgaatcaactggtcaatgagcaacgggaagaagtgaaagaaacagtaatgacggtacagaaacccgacaccataatcattaaggaggattgcccgcccgctaaagtggtgaaaggtatcaaaagtcacgttgctttcgggttaggcaaaacggacgttacccccaatcaggaaatgaacgtgcttgccatagccgattacatgaagcaattccccgaatcgaaagctaccgtaacaggctttgccgacaacggaaccggtaaccgggaaatcaacctgcgccttgccaaacaacgtgcggaagcagtagcaaaacagctaacagaaaaatacggcatcagccgcgaccgcctcaccgtgtccagcatgcaagataaggaacagccgttccagactaacgactggaatcgggttgtcgttatcatcgccgattaaccggtatatcgactaaccagtatatatagaaaaggacaatcatttcatctcaatgattatctttgtttgcttttccagaagggtggtgcatatattggatatatatcgcagcaccctttttcattatactatggaaatatacagtccacttaaccttttcttctcctcttccttttccggataattaaaaagtcttcatttgcagattttcccgagaaaattcgtatttttgcgttcgacgccaatatggcaacaatcaatctttaattcaagagatatgcaagaagaggaaataagactgctcatagccgatttagaatcagaccgtattgaaagaaccatttcttttagagaagataaattgggtccggctgtatgcgctttatccaatgacttccctaatagcaaaaaaagcggatacatattgttaggagttaaagatgatggcaaagttgcaggcataaatattggagatgaggaactaaagaaaataggcggcgtaaaaacaaatggaaacgttttaccacaaccttctataattgtaagtgaagtcttccatattgacggtggggatgtagtagccgtcgaagtaaaaccatcattgtatcctccggtaagatatgaaggtagatgctggatacgagttggtccacggagggccatagccaatgtttctgaagaaaatatacttattgaacggagagcctcatatgccaaaacttttgatttggtaccaactttgggagccactttagacgatatcagcgaagaatatttcaccttatcttatctaccactagcaatagatgaagatactttgcgacttaacggaaggactactaaacaaaaaatggcagctttacgtttcttcgatatcaaaaatgactgcccgacaaatgcaggtataataatgtttggattaaacccattgttctttttaccgggtgcatatatccaatatattaagttcaaaggcgaccaagtgacagatggagttgaatttgaaaagcaattttcgggagcgctcattagcgaattaaaaaatatcgatgattttattaaaaataatatcatcaaagaaaaagctataagaacagattcctttcaggaagtactcataaagaattattcatactgggcattaagagagttgactatgaatgctatcatgcatcgaaattatgattcgaatgctccgatatacatttatgagtttgcatcccgaattgaaattataaactcaggagggctgtatggagacgtaacccctaacaactttccttacgccagcgattataggaatgtagctatagccgaagccatgaaattgttaggttatgtaaataggtttaattatggagtgcaaaatgctatcagcgaattagaaaaaaacgggaacggtgaaccggtattcgatttagagctaattaccaaatttaaagtaacgatttctattaataaaaaatgggaagtataaaagttatcacattctttaacaacaaaggtggcgttggaaaaacgacaaccgtctatcatgttgcttggatgctatcagaaatgggcataaaaagtatagcaatagatttggacccccaatcgaacctaacttctatgtttctttcggatgatagactggaaacaatctatgaatcagaggaaccatgcactgttttaaactctatcagtccaattatttccggtgatccatatgaacccgtccatatagaacctattacaagtaaattgggacttattttaggagatttggcattatcaacttttgaagataagttgagtgatgcttggctgaaatgtttggatggagatgcttattcttttcgaattatgagtatatttaatactataattaatgatgccgcccagcggtttcacgccaaatatattttaatagatgtaggtcctaatttgggagctatcaatcgagcggttttactaagttccgactacatgattattcctgtagcctctgatttattctcgttgcaaggtattaagaatataggagcaactctacacacatggaaacgacaatgggataaaaggctggaacaaaaacctgcaaaaacaacatttacgataccaaatggaaacataaaacctgctggttatattgttatgcaatattcggccaaagagagtaggcccgtacaatcctatttaagatgggcgaaccgtatccctcggatatttaaagaatacgtattaaatgataatataccaaccaactatacggtagaaaacgatcccaattgtatagggttattaaagcattatagaagtttagccccaatgtcaatggaagcgcataaaccgatctttttgctaaaaccggctgatggagcaattggagcacatttatacgctgtcaagaaaagctatgaagaattccagctttttacagaaaacattttaacgcactgcaaataaaagcattaccgtattattccaataaattatgagcgaagactttgaagcaccaaaagacgacttggaaaacgaaatcccggaagggagcgaaggacattcggattataaacccgctgacacgaaagacgtaaaagcaaaataccaactaagcggtatgtaccagaattggtttctggactatgcttcatacgttattctggagcgtgccgtgccccacatcaatgatggtttaaagcctgtgcagagacgcatcctgcactccatgaggcgtttggaagatggacgttacaacaaagtagcgaacatcgtaggacataccatgcagtttcacccgcacggtgacgcttctatcggtgatgcattggtacaattgggacagaaggatttactcgtagactgtcagggaaactggggtaatatactcaccggtgacggcgctgctgctccccgttacattgaagcacgcctgtcgaaattcgccctcgatgtagtgttcaatcccaaaactaccgaatggaaactttcctatgacggacgaaacaaagaaccggtaaccctgcctgttaaatttcctttgctgctggcacaaggagtagagggtattgcggtaggtctttcatccaaaatacttccccataacttcaatgaactttgcgatgcatccatccactatctgcatgaagaggaattcaaactgtatccggatttccagacaggcggcagcatcgacgtttctaaatacaatgacggagaacgtggcggtgcggtacgcatacgcgctaaaattgaaaagattgataataagacacttgctatcaaagaaattccttacgggaaaacggtagccagtgtttgcgactctattgtaaaggcaagcgaaaaaggcaaaatcaagataaagaaggtagaagacctgacatctggcaacgtagagatattggttcacctggcgcctggtgtttcctcggacaaaacgatagatgccttgtatgctttcactgattgcgaagtaagcatttcgcccaattgttgcgtcatcgacgatcagaaacctcacttcctcaccgtgagcaatatactgagaaaatcagtagataacaccttatccctgctgcgccaggagttggaaatacgcaaagacgaaatactggaaagcctgcactttgcctcactggaaaagatcttcattgaagaacgcatttataaagacaaggaatttgagcaggccaaaaatatggatgctgcttgcgaacacatcgacgaacgtctgacaccttattatccacaattcgtacgcgaagtaaccaaggaagatatcctcaaattgatggaaataaagatggggcgcatcctcaagttcaactccgacaaagcggaagaactcattgcccgcatgaaagcggacatagaggaaatagaccatcacctggctaatatcgtggaatatacggtagactggtatttgatgctgaaaaacaaatatggcaagaatttcccgcgccgtacagaattgcgcaacttcgataccatcgaggcaagcaaggtagtggaagccaacgaaaaattatacatcaatcgcgaagaaggcttcatcggcacaggtctgaagaaagatgaattcctctcaaattgttccagcctcgacgatgtcattatcttcttccgggacggacgatatctggttactcctgtttccgacaagaaatttgtgggcaagaatattctttatgccaatgtattcaagaaaaacgataagcgcaccatctacaatgtggtttaccgtgacggaaaagagggtacacattatatcaagcgttttgcagtgacaagcattatccgtgatcgcgaatatgatgtgacgcaaggcacacccgattcacgcatcatgtacttcactgccaaccccaatggtgaagcggaagtcatcaaagtaaccctgaaacccaatccacgggtacgacgcattatcttcgaagaagactttagtgccatcggcattaagggacgccaggcaaggggaaatattctaaccaagcttccggtgcacaagatcgccttgaagcagcgtggaggttctactctgggcggacgaaaagtttggttcgaccgtgacatacttcgccttaactatgacggacgaggtgaatacctgggagaattccagagcgacgacagtatcttggtggtgcatgataacggagagttctacatcaccaacttcgatctcagcaaccactatgaagccaatattcgtatattagagaagtttgacccgaacaaggtatggacagccgtactttatgacgcggatcaacagaatttcccatatatcaaacgtttctgtatggaagcaaccaaccgcaagcagaactatctgggagaaaacaagaacaatcgcctgattttactgacggatgaatgctatcctcgcttggaaatcatattcggcggacacgacagtttccgtgaacccatgattatagaggctgatgaatttatcgccgtaaaaggtttcaaagcaaaaggtaaacgtatcactacgttcacaatggaaactgtcaacgaactggaacctacacgacagccggaggtttcgcaggacacagaagatcaggaggaagaagagccggaaaatttagaccccgatcatggaaagagtgaagatgatatccgggatgaaataacggggcagatgaagctgttctaagtgattaatgattagtgattagtgataagcaactatatcaatgaagttatataagattggtgtaatagtgggatgcctgcttttggcaggtggaagtataaaagcgcaaagtgttgaagacaaggcgctgcaagagctgagggcggactcttctgcaaggacacgctttataacccgcgccacaatgtatggtgtcggcttcacgaacgtattcgacacctacctgtcaccgcaggaatacaaaggcgttgacttccgtatttcccgcgaaagtatgcgcatgacgaagtggatgaacggtaatgtatctctgcaaagtttcttccaggcagacttaggctatacacacaaccgggtggacaacaacaatatgttctccggtctggcaaactggaattacggattgcattataattttccgattacttctaacttcaaattacttgccggaggacttatcgacttaaatggtggctttgtctacaatctgcgcaatggcaacaacccggcacaggcacgcgcttacatcaatctggatgcatcgggaatggcaatatgggatttaagaatcaagaactatccgattagcctgcgctatcaggttaacttgccttttgcaggtattatgttctcacccaactacggacagtcgtactacgaaatatttacgttgggcaactggaacggggtgattaatttcacttccctacacaaccagccatccctgcggcagatgctgactgttgatttcccggtaggaagagccaaaatgcgtttagcctatctctgggatgcgcaacagtccaaggtaaatgatataaagacgcatacctattcgcatgtgtttatggtaggtttcgtaaaagaattgtttctcattcgtgacaagaagaaaaaataaagtgataaagcgataacatcgtgataaggggatagaataatgggaataaaagaaatatatcatagtaagtttagatggctgggagtagcactcatgatactgcctttgctatccagctgtatccgggaggaagagttcaacaattcaccacagggaaacttcgaagctttgtggaagatcattgacgaacaatactgtttcctggattacaaacaaatagactgggatgccatccacgataaataccaacctctcattacgtccaacatgggtaatgacggattgttccaagtgcttgacagtatgctggcggaactgaaagacggtcatgtgaatctgtacagttcttcaaatgtggcccgttactgggactggtatctggattatccccgaaacttcaacgaaggtattatcgaacggcaatatctcggaaagacgtaccgcatcgctgccggtatgaaatataagattctggatgataatatcggatatatctattatgaatcattctccagtggtgtcggtaacggcaatctggatgaggtactttcttaccttgctccatgtagtggcctgattctggatgttcgcaacaatggtggcggaaatctgaccaattcagagcgtatagcggcccgcttcactaatgagaaagtgttgacgggatatatccagcataagaccgggaagggacacagtgacttctctgatcccaaacccatttatttggagccctccaatagcatccgttggcaaaaaccagtaatgcttctcatcaaccgtcactcttatagcgcaacaaatgatttcgtaaatgcgatgcgctattttcctaacgttactctggtaggtgacaagaccggtggcggttcgggattacctttttcttcagagcttccgaatggttggggcgtacgtttctccgccagcccccacctggatgcagacaaacaacatatcgaattcggcattgatccggacgagaaagtagatatggatgaggatgataccaaaagtgatgccattatagaacgggcacgggaactcttaaaagtagttcaataaacactttctatgccaaactatttgccagaaagaaaaaactttctatctttgccaccgcttaacaagaaagccactgcgggtgtggcgtaattggcagccgcgccagacttaggatctggtgccgagaggcgtgtaggttcgagtcctatcacccgcacagtatttaaaatacggttaaaatgtaagaagagaaagcctttggaattagttttccgaaggctttttctttgtttacaattcaatgcttcaggaaatacagatattaattcggtgacaaattcggtgacatcttttcttccggcaactagcttttctacatatcccgcaatgagagcttccctaaatcaagactatattttttcaattccttttccgcctccaatagacttgtcactttctcttccagtttggtaatgctataccgagattcatctctttttatctcgtaaatggcagccgtcttatccaaatcattcaatgtaataagatcgatttcattttctccttttcgattccagtacataccaatatcagtatataaaccagattgcataaatttatcacggaaatagcgctccagcatacttcctgaaaaggcatcataatcccgacggattatattttccaccagtttcaatgcaccggattcaatatacccttgataacgataaataaagcgaaaccaaaaagtaaggaagttatcagctatgcaatagcgtacttgtttagagttctccttagagaaaatagggcgtttcttacttatcaaagaataatatttctccaacttagccaaatagccgccaatctctgcctttcccaaacgattttcaatttctccacgagtatagtctccgccggctatacattctaagatagagaagtaaatggagtaatccggtccaaactcttcaataagcaaattcttcccttcattcaaaaaaggagagttgggacgtgccaacaaaccaatcattttatccttggtatacgccttatttgtcataaacagattgacgtaccacgctacccctcctgtaaatgaataaagcgccaaaagatcatcgggatggtaggatggattgtgatcagccaatatctccttcaacacctccaccttgaatggtttcaaatgtatcatctgtccggcacgggagaaaagaggctctttccgatcttcaaaaatctggtgcatcagcgaatagatagaaccactaacaataaggttcattcttgaagcccccttattcaagtcccactctctttgtatttcactgaagatagaggggttagtacgctgaaagtcttgaaattcatcaataataagattaaagggacgttcccgggagataataagcaagtgacggaataacttggcaaaagaaacataaccgccaataggcaatcctaacttattttcagcttcctctacgaagtcctggcaaagcaaagtttccgccttacgcgcaacaaagaaataaagagtcagatttcctgcggtacactgtagcgccaattgggtttttccaatacgcctccgaccgaatagaacagtcatttgcgactcttgcagggaagcttcacggatattctctaataattcttgttcttcttcacgatcatagaatttcataataaactatgcttttaataaataaatcatcattatcgcaacagctattacggtaacatccattacgataatacaaagatattattttttgtacttacacccaaaagaaatgcaggtatctttctaacctacttaattcatagcaggctaaaggaattgtgttaaaaaaccgggatttgaatgacctcgaaatctttttttcatttgcattgttctgatgcaatatatcattcacataaaaatttaatgcaatgaagagaaacctgaaccctcctatgaagagagccctaaggcttaaaaatctattcttgacggtatgtttcctgctgataggcactgccgcattttctcaggaacggaccataaccggtgtcgttaccgactcatttaaagaaccgttgattggtgtatccattgtggtacaaggcaccaataccggtgtagtgaccggactggatggtgattattcaatccaagttccgccaaatgccacccttgacttctcatacgtaggcatggagaagcaaagcattaaagtaggtaaccaaagcgtcatcaatgtacagatgaaagaagactcgcaaatgcttgccgaaacagtggtcatcggttacggtagcgccaaaaagcgtgacctgacaggatctatcaccaacattaaaggtgatgaaattgccaacaaacctgttgccaacccactgtctgccctgcaaggtaaagtggccggtgtacaaatcatcaactccggtaaggcaggtgccgacccggaaatccgcgtacgcggtacaaactctatcaatggttacaagcccttgtatgtagtggacggactgttcaatgacaacatcaacttcctgaacccgcaggatatcgagtcaatggaaatcctgaaagacccttcctcacttgccatcttcggggtgcgtggtgccaatggtgtaatcatcatcaccaccaagaaagccaaagaaggacagacacgggtaaacatcaacggttcgttcggcttcaaagccattaccaataaaattgcaatggtagatgccgatggtttcaaactgctgtataacgaacagttgaaaaatgaaggcaatccggaatataatttctcggactggacaggtaacaccaactggcaggacgaaatcttccagaccggattcattacgaacaacaacatcagcattacgggtgcttccgacaggcacagcttctacctcggcgcaggttatgcctacgaacaagggaacatcaagcacgagaagtacagcaaaatcacactaaacatcagcaatgattataaagtgacggacaacttcaaagtaggtttccagtttaacggtgcacgtatgctgccagctgattcaaagagtgttgccactgctctgcgggcggctccggtagcagaggtgtataacaaagaatatggattgtatacctccctccccggcttccagaaagcgcagatgaataacccgatggtggacgttgaactgaaggcaaataccacaaaggcggagaactaccgcggttcgggcaacatatacgggcaatgggacttcctgcaacactttcagttcaaagccatgttctcgctggattatgcatcgaacagcacacggacttacacaccgattattaaagtgtatgatgccagtgccgaggacgatatagctacattgggcaccggcaagaccggagtgacccaggctaaagagaccgagatgaaagtgcagagcgactatctgttgacttataccaactcctggggtgaccatagtctgacagccaccgccggttttaccacctattataataaactcgaaaatctgaatgccggacgcacgcaaggcgtagggctggtcattccggacaatccggacaaatggtatgtaagtatcggcgatgccgccactgcaaccaacggtagtacacaatgggaacgttctacagtatctgtactggcacgtattctctataactataaaggcaaatacctgttcaacggctcctaccgccgcgacggttcttccgctttctcttatacaggaaaccaatggcagaatttctactccgtaggtctgggttggttgatgagcgaagaggaatggatgaaaggtatcgaatggctggatatgttgaaactgaaaggatcatggggtaccctgggtaaccaaaacctggatagagcctatccggcagagcctttgctgagcaatgcctattccgcagtattcggtactccgtccgccatttatccgggctatcagcttgcctatctgcctaacccgaacctgcgttgggaaaaagtagaagcatgggaagtaggtgccgaagccaacttcttccgcaaccgtctgcactttgagggtgtatattacaagaagaaaactaaggacctgctggcagaagttcccggtatctcaggaaccgtgccgggcattggtaacctgggatctatcgaaaacctgggtgtggaacttgcactgagctggcgcgaccagatcggcgactggaattataacgtcggggccaacctgactacaataaagaacaaggtattaagccttgtacaggatggatactccatcattgccggagataagagccaaagttatacaatggcaggttatcctatcggctacttctatggttacaaagtagaaggtgtttaccagactcaggaagagattaataattcaccgaagaatacgcttgcaaccgtcactccgggtgacttgaagtttaaagatgtgaacggtgacggtgaaatcaccaccgccgaccgtaccatgattggtgacccgactcctaatgttacttatggcatcactctcggagtaggttataaaaactgggagttggcagtagatatgatgggacaaggcggtaaccagatttaccgtacctgggataactacagctggagccagttcaacttcatggcacaacgcatggaccgttggcatggagagggtaccagcaatacccagccgttgctgaacacgaagcataccatcaacaatatgaattccgaatattatatagaagacggctcgttcttccgcatccgcaacgtatcattggcttacaactttgataaggcgctgatttccaagatcggtatgcaggcattgaaactttatgtgaatatccaaaacctgaaaacatggaagcataacaccggatatacgcctgaactgggtggctcggccatcgccttcggggtagacgacggaagttatccgatgccggcgatttatacgtttggattcaacttaacgttctaaaggaaataaatacaacagagtatcccaattctcctcctccggggaattgctctcccccgataacgggggagccggagggggtggagtacccgaagggggaggtggtaggtaagcaataatacctattaatcataacaataaggaattctttttcacctaccaccccgccctaaagggcacccctcctccggggaggaggggaattaagatagtattataataaccataacaaccaaagattatgaagataaagaaatatatcctatccctgttgattggtgcaaccgccctctcattcagtgcttgtaatgacttcctggaccgcgacccactgggacagttcacggaagacgacgctcccaacgcccttgtaggcggaaagatgtacaatgtctactacttgatgcgtggttatgatatcaccgcaggtatccccgctttcatgatacacatggtacgcagtgaagattctgagaaaggcagtgatgccggtgacggtggcgagcaggctgcaatgtacgatgacttcgagtatactgcttccaacggtcctctgggcgcatactggagccagaactataaaatcatctaccagtgtaatgaaatcctggacgatatagagaagagcgaaaacaaggacgataccgaaaatatccgtaccaagggcgaagccctcttcttccgtgcttactgttacttcaacttggtgcgtgccttcggtgaagttcccttggtaaccattaaagtagtcgaggcttccgatgccaatgtccccaaaaccactgctgagaagatatacgaacagattgacaaggacctgaccacagccgaggattgcttgccactgcgatggaacagtgactacaccggacgcgtcacctggggtgccgcacgttccctgcacgcacgcacctacatgatgcgtaacgattgggacaatatgtatacagcctctaccgaagtaatcaactccggcatttataacctgaatactccggtagataaagtcttcaccgtagaaggtgagaactgtggtgaaagtatcttcgaactgcaatgtgaagcaaccgatgccatgaaagaagatggtagtatcggcagccaattctgccaggtacagggtgtgcgcggagcaggcgattgggatttgggatggggctggcacatggccaccaccctgatgggtaaagcttacgaaccgggtgatccgcgtaagaatgctacactgctttacttccgccacagtaatgacgaccccatcacaccggagaataccaatacaccttatggcgaatctcccgtttctaccgccatgggcgcttacttcaacaagaaagcatacaccgacccagccttgcgccgcaagtatacccgcatgggcttctgggtaaatatccgcctgatccgttacccggacgtgctgttgatggctgccgagtctgccaacgaaaaaggtttgatgggcgaagcaagcggttatctggaacaagtacgcgcacatgcccgtggcacactgaccaatgtacttcctaaagtagagtctctggatcagagtgtattgcgtgaagctatccgtcacgaacgccgcgtagagctgggattagaacccgaccgtttctatgacctcgtacgttggggtatcgcacaagaagtgcttcaggctgccggaaagaactatcagcctaaaaacgcactgctgccattgccgcaaacagagatagataaatcaaacggtgtattgatacaaaaccccgattattaatcaattaggaattaaataggggatatcagaaagatgccggcaggtgactaaaagtttctcggtgtgaaaccattggtttcatgccttgaaactctcagtttcacaccgagaaaccggcagtttcatcgcttgaaactggtagttccaactgggggaacaaacaaatgcaaagtatctccttaccggactctaacttatataaataaaaagatatgaagaaaatactcaaaagaacaagcctgttgctgatcagcgctttaatgagcatagcggcggcacaggctcaaaagtcaccgcaagacatggatcgcttcatcgacgcactgatgaagaagatgaccgtggaagagaaaatcggacaattgaacctacccgtcacgggagacatcaccacgggacaggccaaaagtagcgacgtggcacaaaagattgaaaaaggattggtgggcggactcttcaacctaaaaggtgtagaccgtattcttgaagtgcaaaagctggcagtagagaaatcacgcctcggcattcctctgctgttcggcatggatgtgatacatggctacgaaaccatcttccccattccattgggattgtcctgcacctgggatatggcggctatcgagaaatccgcccgtattgcagccatcgaagcaagtgccgacggcatttcctggacattcagtccgatggtagacatcagccgcgacccacgttggggacgtgtcagcgaaggctcgggagaagatccgttcctgggtggagctatcgcacaggcaatggtatacggataccagggtgccaatctgcaagaccaattgcaccgcaacgatgaaatcatggcttgcgtaaaacactttgcattgtatggagccggagaagccggacgcgactataatacagtagatatgagccgcaaccggatgttcaatgaatttatgtacccgtatgaggctgccgtagaggccggagtgggtagtgtgatggcgtcattcaatgaaatagacggtattcccgccaccggaaacaaatggctgctgagtgatttgctgcgtggtcagtggggcttcgaagggtttgtggtaacagacttcacaggcatttcagagatgatagagcatggtgtcggcgacttgcaaaccgtcagtgcactcgctcttaatgcaggggtggacatggatatggtaagtgagggcttcgtcggtacactgatgaaatccattaaagaaggaaaagtaagaatgggcacgttgaatacagcctgccgccggatattggaagcgaaatacaagctgggactgttcgacaatccttataaatactgcgacgtgaaccgtccgaagcgggatatcttcacaaaagagcatcgtgacgccgcccgcaagattgccggcgaaagttttgttcttctgaagaatgcccccgccaccgcacagccactcgcagctcatagctcgtcacccgtaactgcttcccccgtgcttccgttgaagaaacaaggtacagttgccgtcatcggccctctcggaaatacccgcagcaacatgccgggcacctggagcgtagccgcacgcctcaacgattatccttctttatacgaaggcttgaaagaaatgatggcaggcaaggttaacatcacctatgccaaaggtagtaacctcatcggcgatgcagcttacgaagaacgtgccaccatgttcggccgttcattgaaccgcgataatcgcacggaccaggagttactggacgaagcactgaaagttgcagccggtgccgacgttatcgtagctgccttgggagaatcctctgaaatgagcggtgaaagttcaagccgcaccgaactcggcttgcccgatgtacaacataccttgttggaagccttactgaaaacgggtaaacccgtagtactaaccctctttaccggtcggccgttgacgctgaactgggaacaggagcatgtacctgccatcctgaatgtatggttcggaggcagtgaagcggcttatgccattggcgatgttctgttcggtgacgtcaatccgagtggaaaactaaccatgactttcccgaagaatgtaggccagatacctttgttctacaatcataagaataccggtcggccactggcggcaggcaaatggttcgaaaagttccgttcaaactatctggatgtggataacgaaccgctgtatcccttcggttatggattgtcgtataccactttccagtacagtgacattgcattgagcacaccgacattgggaaaagatggttctgttacagccgtagtcaccgtcaccaatactggtaaacatgacggtgcggaagtagttcaactctatatccgcgacctcgtaggaagcatcacccgccctgtacgcgagttgaaaggtttcaataaaatcttccttcgcgccggagaaagcaaaacggtatcattcactatcacgcgtgatctgcttcgcttctatgattacaacctgaactacgtagccgaaccgggtgactttgacatcatgatcggtggaaacagccaggctgtgaagacggcgaagttgacacttaaataactcacagcttattatccctaaccccttattaattatgaaacaattaacaacctatcttcccctcttcttcttgcttctcctcggagcctgcaagaatgccaagaccggaagtgccgcccaacttactgatgatgccctcatggacaccgttcaacggcgaaccttcaattacttctgggaaggcgcggagcctaacagcggtcttgcccccgagcgtatccacatggatggtatctaccccgaaaaagaccagaacgtcattacttccggcggtagcggcttcggcattatggcgatactttcaggtatcgaccgcaactacatcactcgtgaagaaggtctggcgcgtatggaaaagatagtctctttccttgaaaaggccgaccgcttccacggtgcctatcctcactggtggtatggagacaccggcaaggtaaagcctttcggacagaaagacaacggtggcgacctcgtagaaacagctttccttatacaaggactgcttgccgtacaccaatattacgtcaacggttctccccaagaacaggcacttgccaaacgcatcgataccctttggcgtgatgtcgactggaatttctatcgccagggcaaccagaatgtactctactggcattggagtcccgaatacggttgggcaatggacttccccgtacatggttacaacgaatgtctcatcatgtacctgcttgccgctgcctcacccacgcacggcgttcctgcctccgtctatcatgagggatgggcacagaacggcgccatcgtcgaaccccataaagtagaagatatcgaacttcatttgcgctatcagggttgtgaagctggtcccctcttctgggcacattattccttcctcggattagatccgacgcatctaaaagatgaatactgcgccagctatttcgatgaaatgcgtaatctgactctcgtgaaccgtgcttattgcatccgaaatccgaagcactacaaaggtttcggcccggactgttggggactgactgccagctactccgtcaacggatacgccgcccacatgccgaacgagcgggatgaccagggagtcatctctcctacagccgctctttcgtccattgtctataccccggactattcgctcgctgtgatgcgccatctctacgacatgggcgataagctattcggtccttatggtttctacgatgctttctccgaaacagagaactggtatcccaaacgatatcttgctatcgatcagggacctattgccgtcatgatagagaactatcgtaccggtctgttatggaaactatttatgagccatccggatgtgcaaaacggattgcagaaactgggattctcaacagataaataaataagaaaagtctatacggcaaaagttttttcaccacagattacacggattctcacagattatcagttttgaataattatctattcacttttcacctgcgttaatccgtgtaatctgtggtgacttccgacaaccctacttttattatcccacaagatcgctcacaccgtccttattctttatctatctcataaacaatgcattaaattgatttgagtagtaaatgagtagtccccgatttgttaaaaatcagggatatgtattggtggtgaatatcttttttgcagttcgcacatcgaaatttctacatttgcgatgaagtttaattcgagcactgcgcagagctaagaagaaaacaaaaagagttatccacctaaaaaaatttaatgcgatgaagagtaaaacacatcttctgaaaaaagccttatggctaaagaatctattcttgacggcgtgcctcatattggtagcaatgcccgtactctcccagacaagaacagtaacaggtaccgtaaccgacacatcgggtgacgcactgattggtgtatccatcctcgtgcaaggtaccagcaacggtgtagttaccgatttagacggtaaatatacattaacgaacgttccggaaaacggaacactcacttttagttatataggtatgttaccgcaagatataaaagtgaacggacgttcggctatcaatgtgacattgaaagaggattcacagcagttggaagaaattatcgtaatcggttatggtgctgcaaaggccaaagacctgacggctcccattaccgtagttaaaggtgaagccctgactgccataccttctactactcctatggcagccctccaaggaaaagttcccggtgtcaatatcgtaaataatggtgctccgggtgaaggtcctaccgtacagatccgtggtatcggttcattctccaacagtaagccgttgttcgttgtagatggtatgttctacgacaacatcaacttcctgaacaacgcggatattcaggaaatgtctatcctgaaagatgcttcggctgccgctatctatggtgtacgcgctgcaaacggtgtagttctcatcaccaccaaaaaaggttcgcgtaaccagaaagcaaagatcacttatgacggttatgtaggtatccagaaagcatccaatgtgctcgaactctgtaatgcacacgaatatgcaactatgcttctcgaaggtaacttcgactcctataagacccacttcatacagtccatcgacaaatacggcggtagtcatgatgaccccgacttccacaattggacctttggagcagacaacgattggtacgatctacttctgcgcactgccgctatcacaaaccacagtttaaacattaacggtggttccgaaaaagcggtgtatgctgtcggcgtaagctatttgtatcaagacggtgttatggatgttgacaacaactacaaacgtatgaacttccgtggttctgtcgattatgatgctacgaactggctgaaagtcggtttcaacggtgtgtttagtaactccacacaacaagtgcctaacaatcaggcatggcagaaagcgttcaactgtcctcccatcgtggctctttatgacgacaagtacaatgaaaagtcttttcctgacaaatttggttctccggatgcaatcggttatacatcaaacttctataatcctgtcgcaactgccaagtatttcgattcaagcaaagaaaactatcaggtattgagcaacttctacgctcagattgattttattcccagcaaattgaatttcaagacgaactattcctatagtttcctctctacccaaggtcgtgagtttactccgaaatactacgtaagcagctggcaacaatcagccaccactcagcttacaaagaacgaaaacaagtattacaactatatctgggataataccctgacttataatgaccaatggggcaaacacagattcggcgccatggcaggttactccatgcgtcaggaacaatggcgcatgttcgaaggtaaagcaagcaacgttcccgatggagctgacgaatactggtacatcaagaacggtgacgcagcaggtgctaccgtaaaagacgacggctactgctacagaggtgtttcttacttcgcccgtctgaactacaactatgatgacaaatatctgttgatgttcacaatgcgtgccgatggttccagcaaatatcaggaacattggggttacttcccttcagtaggtgcagcctgggttctgtccgaagaatcattcttgaaagatcagaaatggattgacttcctgaaactacgtgcaagctggggtaaactgggtaacgaccaagtagcagcaagcgacggtttcgcttctatcgcgactggtaacgctgcatccggtgtatttggtaattctaccattgcaggttatcagaacagtacatacttcagttggttgaagtgggaagttgttgaagaatggaatgcaggtataaactttattaccctcaacaaccgtctgaatatcgacgttgactattatcaccgtatgactaataatgctgtgatcgctccactactcccattcagcaccaccacccttgccggaaactatggtaagattctcaactccggtatcgatgtaagtgccaactggaacgataaaatcggtagagacttctcatacaatatcggtgtaaacatctctactttgagaaaccgcgtgaaagacctgaacggtaacagtatcatcagaggtggtaagaccgttaatattgtaggtaaagaaatgaattcattctacggcttcaaaatgataggcgtttatcagacagaggaagaaattgccgctgatcctattgcagtggccaacggttgtgtaccgggtgacttaaagtatgccgaccttgatggaaacaatgttcttgacggaaatgaccgtactacattaggttcctatattcctaattttacttacggtatcaacctcggtcttaactacaagaacctcgacttccagctgactacctacggacaggccggtgcccagatgttcaaccgtaaacgtgcgcttcgttattcttcacaaaattataacttcgaccgcgcccaatatgaaaaacgctggacaggcccgggttccacgaactccaatccgtcggctgccgccctgctgaaaccttggaacgtaagcgaccagaagtatagctcttactttgtagaaagtgccgactacttccgtattcagaatattacgcttggttatacattccgtaacctcaagtttggtaactataccatgccgggcttacgcctgagtctgactgccgaccgtccgttcacaactttcaaggccaacgcattcactcctgaattgtccgacagccaaggttgggataccgaagtatatcctttgacatcgacttacaccttaggtttgaaaattgatttctaagaaataacccattaataatttagaactaatgaaaacattaataagaccttttatatatataatgtccgccttgatggtattatcgttcgcatcctgtaatgattttctggacaaagagcctgaaggaaaagtgccggaagagaaggtggattataccaatatcagcaatatgtaccaaccggtatcaggcgtatatgcaaagattcgcaccagcggtttgcactgggtgatctgggaaattactacgattcgcgaccaagacgtatttagcggccagtggaatggcagcgactattacaacctgagcgaatataagtataatgattctttctggggcttcaacgaattgtggatgcaatattacaatattatcaaaactgccaatgcagctattgaatcgttagacctgtacgctgagaatatcaccaacgatagcgatatgaaaaactataaggcatatcgtggtgaagtgatgtttatgcgtgcttatgcctactatcgtctggtgcaggcatttggtccggttaccattctccgcgacaataatcaggttgatttgagccgctccactgccaatgcggtaaacaaatatgcattggaagatttgcagtacggcattgataatatgccgcgtatccgtccgaaccaaagtgaacacaagggagccgttacagcgttctctgccgagatgctggctgccaagtttcatctgaacatgggtaactatgcaaaggtagaagaactgacaaacgatattattgagcatggtaatttctcactctatcccgacttctaccagttatggaagattcccggaaagctctgtgacgagtctatattcgaatgtcagatgactgacttcggcaatggttccggagatctgattgatggtgaccaatggtttgtttgtcaaggtcccaataactccggcagtgacatcagcggttggggagactgcggtatcctgaaatctttccgtgactgggcatacgctcgtggagagacaatacgtgccaccacttcattcctgctggcaggagaaacgacaccggacggtgattatatccgggagcaagtagatccgaaaaagaccgactgctggaacggtaaagcatacaccccgctgaaccaattaacaccgggacgtacgaaatacggtacaaacaataatgcacgtattttccgctatgctgatgttctcttgatgaatgccgaggcgaaaatcaaaaatggcaagaatggtgacgctccattcaatgaagtaagaagacgtgccaagatgccggaacttaccaatgtaactttccaacaagttatcgacgaacgccgtatggagttggtgtgcgaatggggcgaacgttataacgaccttgtacgcaccggtctggcaaaaacagaattgaaaggctggtctgaagataaggcacttttgccgcttcctttcaaccagtatactcagattcctgatttgctgaaagagccgaaggatgagtaaccttatgaattaatttagttttcgcaagttaatgataacaacatacagattgcaccggattatcattaacttgcgaaacttaaataaatgcccaaacaaaacatatcatgaagaaagttttcagaaaaacaagcttattgctggctactgccctgatgggtgttaccggtatgcaggcacaaaaagctccgcaggacatggatcgcttcatcgacgcgctgatgaagaagatgactgtggaagagaaaatcggtcagctaaacctgcccgtttccggtgaaatcgttaccggacaagcacagaacagcgatgtagccaaaaagattgagcaaggatgggtaggcggacttctcaacctgaaaggagtagagaagatccgcgatgtacagaaacttgctatagagaaatcacgcctgggtatccccctgatattcggtatggatgtggtgcatggctacgaaacaatcttccctattccattggggctctcttgctcatgggatatggacgctatcagaaagtccgcccgcattgctgctaccgaagccagtgccgatggtatctcatggacattcagcccgatggtagatatcagccgtgatccgcgctggggacgtgtcagcgagggtaacggtgaagacccgttcctgggaggcgccatcgctaaagcaatggtgtcggggtatcagggagtggacctcaacaatcagttgaaacgaaacgatgagatcatggcatgcgtaaagcacttcgctctgtacggagccggagaagccggacgcgattataacactgtggatatgagccgcaaccgcatgttcaacgaatacctatacccttaccaggctgctgtagaggctggtgtaggtagcgttatggcttctttcaatgaaatagacggcgtgcccgccacagccaacaagtggttgatgaccgacgtactgcgtaaacaatggggattcgacggttttgtagtgacggacttcacgggaatttctgaaatggttgcgcatggtatcggtgacttacagacagtttcggcacgtgcgctcaatgcaggcgtagatatggatatggtgagcgaaggcttcatcggtaccattaaaaagtctatagccgaaggaaagattgacatggaaacactggacaaggcttgtcgccgtatccttgaggccaagtataagctgggattgtttgacaacccttacaaatattgtgacctcaagcgcccgaaacgggatatcttcaccaaagaacaccgtgatgttgcccgcaagattgcaagtgaaagctttgtacttttaaagaatcaaccggcaaaaatcggtcaggctcctgtattgccattggcaaagaaaggtacggttgccgttataggtccattggcaaatacccgtagcaacatgccgggaacatggagtgtagctgcacgcctcaacgattacccttctgtatatgaagggttgaaagaaatgatggcaggtaaggtgaacatcacttatgccaagggcagcaacctcagtagtgacgccgcttacgaagaacgtgccaccatgttcggacgttcgctgaaccgtgacaaccgcacagacaaggaaatgctggaagaagcgttgaaggtagcggcaaacgcagatgtcatcgttgccgctttaggtgaatcttctgaaatgagcggagaaagttcaagccggacagatctgaatattcccgatgtacaacgcacattactggaagcattgttgaagaccggaaaaccggttgtattgaccctctttactggccgtccattgacactgacctgggaacaggaaaatgtacccgctatcctgaatgtatggttcggcggaagcgaagctgcctatgctatcggcgatgtactgttcggtgatgtaaatccaagtggcaaactgaccatgacattcccgaagaatgtagggcagatccctttgttctataatcataagaacaccggccgccctttgaaagaaggtaaatggttcgagaagttccgcagtaactatctggatgttgacaatgatccactgtatccgttcggttacggtttgtcatacaccacattccaatacggggacattactttgagcgctcctgcaatggaccaggacggttctgtaaccgctgtagttacagtgaccaataccggtaagcgggatggtgcggaagtggtacaactgtatatccgcgacttggtgggaagcattacccgtccggtgaaagagttgaaaggcttcgaaaaaatcttcctcaaagcaggtgagagtaagacggtctctttcaaaatcaccccggaattgttgtacttctacgactatgatctcaactatgtagccgaaccgggagactttgatgtaatgatcggcggtaacagccagcatgtaaaaacagcccgtttgagcttaaagtgataattcagaataaaaacaaaggaaacatgaaatacatagttttactgacctgcgtgtgtagcctgatgcttcttggcagttgcaaaaaccagtctgcacagaatgaacagccactggaggtgatgacctttaatgttcgcctggatgctccttcggacagtgccaataactggaaatatcgcaaagataacgtctgccaaatgattacctactatcagcccgacctgctgggtatgcaggaagtacgtcacaatcaaatggaagacctgaaacaaggtcttccccaatacaccgctttaggcgtaggacgtgacgatggcaaggaagcaggcgaatattgcccgatattcttcaacagccaccggttcacattggtggaatacggtaatttctctcttagtgaacagcccgaaaccatcggcatcaaaggctgggacgcctcctacaaccgtattactacctggaccatactgcaagaaaagagtaacgggaagaagttggtattcttcaacacccatctggacaacgacggagagacagctcgtaaagaaagcgtacaactcattctgaacaagattaaagagattgccccgcacatgccagccatcatcaccggcgacttcaattgtactcccgacgagacacctctgcagactcttgaaaaaggaggaatggaaaatgcgtcaaaggtggcagccattacgtacggtccatcctggtctttccatgatttcggtcgactgccgctggaagaacgtgtcttgctggattatgtgttcgtgagcggcggcatgaaaacgaaccgttatcgtgtcatccaggataggccggagaatggcttcctttctgatcacgatcccgtacttgttgatgtaatccttcaatagaaataggtatgaagacacaatatagcttattattgctcctgttgttgctgggctttacacaatgtaaaagcccggcagcaaaaccagaccggataagcgacgaagccctgatggacaccctgcaacgccgtaccttcaattacttttgggaaggagccgaacctaatagcggactggcatgcgaacgtatccatatagatggcatctatcccgaagatgaccagaatgtagtgaccaccggtggcagtggcttcggaatcatggctgtgttggcaggcatcgaccgcggttacgtcacccgtgaagaagggctggcacgcatggagcgcatcgtctcttttcttgaaacagccgaccgtttccacggtgcctacccgcactggtggttcggagataccggacaggtaaaacctttcggacagaaagataacggcggtgacctcgtggaaaccgctttcctgatgcagggtctgcttgccgtacaccaatattacatcaacggctcccctgcagaacaagcccttgccgggcgcatcgacacactgtggcgtgaagttgactggaatttctatcgccggaacgatcagaatgtactctattggcactggagtcccgaatacggctgggaaatgaatttccccgtacacggttacaatgagtgtctcatcatgtacattcttgctgctgcctcccccacgcacagcattcccgcaactgtctatcatgaaggttgggcagaaaaaggcgccattgtcgatccccacaaggtagaagatatcgaacttcacctgcgctatcaaggttgtgaagccggtcccctcttttgggcacactattctttcctcggactggacccgacaaatttatctgataagtattgtcccggttatttcaatgaaatgcgcaatcttactctgatcaaccgcgcctattgcatccgcaacccgaagcagtggaaaggttttggtcctgattgttggggactgaccgccagttactctgtcaacggctactctgcccatgctccgaacgagtcggcagatcacggagtcatctctcccactgccgctctttcttccattgtctatactccggaatactcactggaagtgatgcgctatctctatggaataggagacaaggtattgggaccttatggcttctatgacgctttcagcgaaacggaagattggtatcctaaacgctatcttgccatcgaccaaggacctatcgctgtaatgatagaaaattaccgtaccggcctgctgtggaaactattcatgagccatcccgatgtgcaaaccggactgaagaagctggggtttaaataagctcaccacagagtgacacagagtttcgccgagtttcatttttttgttttttatagattgaactctgtgagactctgtgtcactctgtggtgaataaagaaaatcccctatatttttactctaaccttaaattaattatctttgtcccaagaataacaataaggtcatgaccttttctaacctttattcaacctattatggacatccgaaaaaacattatcataacctgtgtgtccctttttgtatgcgccaccatactcgccaaccagaaaccttatgtcaccaacctctcacgtgacaaataccacgctgccaacaagaattggtctatcgggcaagatgagaaaggtatcatgtacttcggtaacagcatcggcctgctggcatccgacggcatggaatggaaactctttcaaacacctgatgccagcctcgtacgcgccatagccgtagaatcccaccacaccatttacagtgggggctccgaagacttgggacgctgggatcgagaccaatcaggagagctgaaatacacttcactgaaaggattaatcaatggagataacccactcgacaaccaaagtttctggcgtatctggatagaaggcgacaaagtgtatttccagtctttcagtcatatctacgtatacgatcaccataccatcactcccgttgatgggccaaacgcctttttacttcttctgaaggtacgtaatgaatactgggtacaagaaatgtatggtgcactttatcagttgcacaacggcatactcaacaaaatccccgggagcgaattcctgaacggcaccactacccgtgtcatcctaccctacgataccgaccgttatctggtaggcacttccaccggtgcaatctatatctacgatcaaaagaactttatcccttggaacctctccctctcgcggcaattgagagggcaggaactgaactgcgctatctattccgccaagcggaacacctattatctgggtacacagctcagtggcatatatgaagtagatacccatggaaatatcctcaatcacttctccactgctaacattcttcagaataacaccgttctatccctttacgaagataatcaaaataacatctgggtagcccttgaccgtgggctcgcttacatccggtataccgatggtttaagttactaccgttccacagacggtggcttcggcggcatatacgatgctactatctggcacgacaatctgctcatcggaacgaatcagggaatttactacacccgccatgacaagctcaatgatctggatatgttttcttccctcaaattgatagagggcactcaggggcaggtatggtcctttcgtaaaatagacggacggttgttttgcgcacatactaacggactgctggaaattcttcccgatctccatatccgtcacccgtatcgcatcaatacaggagtcttccgcaccctggaggcaaccatcaatggaaaacaaatacagattatcattacctatgatgaactcctgatattaaacagaactaccggagagctaaactccatgcgccagatcgccgacccgatatataatgccgaagtagatcatttgggaaatatctggttggaaaccagcagtcgaggcgtctacaaatgccgtctgaatgacgaacagagcgctttccgatactatacgtattacggtaatgagaaggacagctcactccctgcccgcctgcaattattcaaatcgggcggacgcatcctattcttaggcaatgatcaattttatatctatgatgaggtcaacgacaacttgcagcttgagcagcatctgaaccgatgtttcgaaacgatacacgatctgaaacgtatcgttcccatcgatagtgaagaaagctgggccatcaccggctcatctgtctaccgtttcttctacgacggatacattgcccgcatccgcgaagcatataaggtggaagctgacaatctttcactcatcacggcttatgagaatatttccgttctcaacgactccctctcactcatttgcctggatgcaggttttatcctccatgactctcatcgcagcaaacggcaaaccgtagaactttccgcccctaatctggaatttattcatgccggaaaagaacagaatgcaggtttcatggacctcaacaaaactattcatatcccctataaagacaatacggtaactgtcggcttctctgtcaatgccgcctttgccggaaaccttttcgttcaataccaactggaagaaatggacagtacctggagtgccccgaagcgactgaacagcatttcctacgcccgcttgccgcaaggcaaatacacacttcacctgcgtaccacggacggcttaaacaattactcaccggacactcttctggaattcgacgtacttcctccctggtacaatactgtctggtggtatcttacctgctgcttactcattatcgccactctgttcggtaccttctacctgatgaaacgacgtctgcaaaccaagcacttgcgtagaatgaaatctcaggaagctacacgcctgcgtttgatgaacgagcaactgcaaaatgaaatcgaggaaaaagatgccgagatctttacccagacctctttcatcatccacaagaacgaacttatcctgaaactgaaagagatggtagatgagatttgctcccgtaatacgcagaaagccttattacctctttatcagaaaataaatacgttgcttgccaataacctcgatacggaagatgactggaaaatgttccttatcaagttcgaacagaagcaccgcaacttcttcaaacggttgaaagaggcgcatccgcagctgaccaacaatgacttgcgtctctgtgcctgcctcaagctgaatatggagactaaggatattgcctcattaatgaacctttcggttcgtgcagtagagaataatcggtaccgattgcgaaagaagctcgatctgaaacctacacagaacctgaatgagtactttttgaatatggattgatagaatctctaatgatgtaacaccatgaaaagtatctgtaacatcctactaaccggttaaaacaaacatcgtctatctttgccaacagctgtaaacctcttaaaagatagaaacatgaaaaacagaaaaacacgtttatgggtactgattgttctgctgaacatgggtatgggcagttccacattcgcacagaaaatccccttagtctacactgtggaaaatacaggaataaagaatcctgcacccgtgttgccgggtatcgacgaactgccggtggtaaaaacactgaccgatcccttccaatggtccgatggcagtggccgttcaaccaacttcaaggactggagccgacggcgtgcagagatagcccgcgaaatagaacactacgaaatcggcgagaaacccgtagtatcgaaaaaagacattaccgcggatatcgtggatgataccctcagagtaaatgtaacagtgaacggacagacgctcaccctgaaagcaaaaatcacttatccggcaggtaaaggccctttcccagccatcattggaataggcagaggcacgggtagtcttcctcccaccatcttcacgagccgcaatatagcacaaatcgcattcaacttcacacaagtcatgtcgcacacacaaaagcgcggcaacgagcctatcaacaaactttatcctgaccgtacggacatgggagcctattgcgcctggtcctggggagtgagccgtatcattgacggattggaaatcgtaggtaaaaagagcaagatagataccaaacgactggccatatccggttgttccttcgccgggaaaatggctctttttgccggagcattcgatgagcgtattgcactgaccattgctcaggaaccgggtggtggcggtgcggcagcatggcgtgtttccgaaacgctgggtgaagtggaaactttgggaagaaccagtcatgcctggtttaaggaaagtatgttccagtataaagaagataatgtatcgaaattgccgtatgaccaccacgaactgtgtgccatggtagcaccgcgtgcactgctggtactcggaaacccggactatgtatggctggctgatgaatcgggttatgtctcctgccgtgctgcccgtaaagtatgggaaaccttcggtattgccgacagaatgggcttctccatcgtaggcggacatgggcactgccagctgcccgaaagccagtatcctgaagtagaagcgtttgtcgacaagttcctgcttggaaagaaagacgcgaatacagaagtaaccattgcgccactttacgaaaaggtggactatgagcgctggttattccactaaaactctttatctttgggggtataacacttactaatacccccaaagaatcatgaaaagaattttattggctatctgtgtgatagcgctgtctctcctttcctacggacaagacagcaacgaacgagccttcactttcgcatggctcagtgatgtacatctcaattctttcgcctatgccgaagacgacctgcggcaatccattgaagacatcaatgccaatcctgacgttgccttcaccatcctcagcggcgatgtcactgaattcggtgacaccaaggaattttatctgctacaagacattctgaagaacttccggaaaccttattttctcatccccggcaaccatgatgtaaactggagtgaaaacggatgcactatgttcgacaagattttccaagcctcccatttctgttacgactggcagggagtacgtttcatcggctgtggcgccggaccaagtctgcgtatgggaccacctcacattccccgcgaagaaattctgtggctcgattctatcgttcgcaccactccggcagaacaacccattattttcatcaatcatttccctatcgatcaggatctgagtaactggtacgaagttgtcgacatccttaaaacgcgcaatatccaggcaatactcggcggacacctacacgtgaaccgtgcttatgatgccgaaggtattcccgccgtaatcggccgttcatccctgcgcaggaaagatccgataggcggatataacctggtcacacttcgcggcaattcattagagttccacgaacgcatcatcaaagcagaaacccgccctgcatggaatacgatgcatctggcacctttgcaggagaagaaggataccacttactatcgtccggatttcgccatcaatgctacttatccttcggtatgcgaaacctggaaattgaaggatgtgaccgacatcgcttcgcagggaagcatagacggtaacctgtacgtttacaccaatacggccggtgttgtccatgcccttaatgccaagaacggcaaaacccagtggacctataccaccggaaacaagatattttcagccccatttatcaccccaaaacttgtcatagtctcttcctgtgatggtttcatctatgcccttgacaggaagcaaggcacagtgcgatggaaatacaatactaattaccccattgtagcgtgccctgtcgtaaccgaaggtacagtctacatcggcagcagcaacggcaaattctactctttaaagctgacggacggaacactgaactggacttgtaatggtctgcaaggctacatcgaatcacgcccggctgtggataaagagcgcgtatatataggcacctggggagcgatgttctatgccatcgaccgcaggagtggggagaaaatctgggagttcgacaccaaacgaggcagatatttctcaccgggtgcctgctggccggtagtactgcggtatacgcggcaaggaaagccgaatgaacaagtcatagttctcagctccgactatttcgtccgctcattccatcccgggacgggagaatttttttgggcttccgatgaagcgaaaggacgcgagtccctcggtttctcaccggatggaaaaacaatgtatgtgaaaggaatcaagaacaacatcaccgctgcggatatatctcacggcacctataccagtctttggaatacatcaatgccctacgaaagcaacttcatccccacccgtatggaaacaactgaacaactggtgttcattcctactgaatttggtgttctccatgccgtgcggacagacggaagcggcattgcctggtcacacaaaatctcccattcggcaataacttcactaaagaatgcaggaaaagggaaaatcattgtcatgacaatggatggtacagtgacttgtctggaatatcccttatagaaaacagttcatccgccgacgtcacggataatgcagacttcattaatcgtaaatctgcgttatccgcgccatctgcggatgaaaaataattcaggaaagtacgggcagattattctccgccaccgcccccttcaccaccgctactcttcacatcatcattgctgatggtacgcgcggctttcttcacactggctttcaactcaccgatgcgatagctaacacttacaccaaaacgctgacgagtatatttattccaactatcctgtataaagcctacaccttctatacttgaagtcggatgctgatatttcttaaagaaattgctagcaaatgccgacaaggtcagacgcttcttcaagaatgatttgtttacactcaatccgtagtcaaagaaactgctcccctttccctgcaacatgatccaaggcgtctgaccataaatattcagactgatacgccaatcgtgaggcaaagactgctgagcaccaccataagcaaacaaattccaaccgtcattcttcaatccattggcgccttccaaataagtatagttaccataaaggtttgcatagatacgtgtattggaggtagcattccagttgatataaccacttaggctggcattcctgcttttacctatattctgataagtagaataaagcacttctttaccagtaggattttgcagaccgaaaatttctgtatccttcacctgttctgttacccgttcaatactattattggtaaagctatagcgggctgaaagattgatattaaacttctgcgtgaagttactgtaactcaagttaaatgaatgactcttctcactatccaaatgagagttaccctggcttatatttgtaggattactatcgtccagataaggattcaaataccagatccccggacggtaaatacgcatattataaccaaaacgaagattagacatatctgtcagcttatagccaatacttgcagaaggaactaaatcatcaaagttcttatcaaagttatctcccttacccaacagatatttcacctcctgcttggtatgctcataacgcacaccaagtcttccggatatcttcttcactttcagtccatatccaaggtatgcagccaaaatatcattctggtgtttataatgcgaactgtgatcattgtcaaactcataatcagcttgagttgctgacgcttgttcataacgatcatcttccgaagaattatcacggagaatatatttcgcaccggcttcaagagtatgtatcttgccgataggcgtcgtataatcagcctggaaagtatgttcagtagtattctgggatccatcattatgctgatttttcatacgtttcataaaatcctgccaatccggagctacatcctccatatcataatcataagtggagtatgaatccgaactttccggtctggtattgattttataagagaaggtcaacatacgatcttttacatgaaacatacgttggtagtcaatgccaccatcaatagaataccaggaacttttgcttctattgttcgatacatattgatacagatcatcaccggtaccgggcatcgttgcaaaagtattactcagtccattgctgttatttccaccaccccaaagtccgaacgacatggttatcaaacgcaaagtatcaatttcataactggcttccatgctgccggactggaaattaccatgccctttactatcgccactataatctaaatctgaagaaccgtcggttatgtcgcctaccgtacgacgagtaccaccagaatagctacgcggacgatcgttataattataattataacgagcacttaccgtcaacttaccactcttaattgtaccgaacaggccgccaccagcccccatgttactaacgtttccactaaatgtagtcgtatacccttccagtccgctacctacagtgacaatattcaggattccccctacaccttcagcgtcatatttaggaccgggattagtaataacctcgatatgtttgatggaattggcgggcatacttttcagtacttccgtcggattattactcatcatattgttaggtttaccattcacatacaccttaaagctgctactaccgttcaccttaatattatcttcgccatctacagttaccaaaggcactttacgaagcatttccaatacagagtttgactttgaatcaggatcatcctgcacattatattctatcttgtcaatatcagctttcaccagtggtttttgagctaccacctctacttgtccaagctcattggacgcatctgtaatatacagcgtaccgaaatcaacaactttctctcctgctttcacagtaaaatctttcacaatggtatttctaccgatagaagaaatcgtcatcacgaaatcacccgtccccggaatcttctcctgaaatttacctttcatgtctgttaccagcattttcaatgcatgggcaggcgcttcttttttcacgattttgattgtggcataaggttctccctcttgagtcaaagaatcctgtaagactcctttaatctgaaatggaggtgccgcattctgtgccgctaccaatgaggatattaccaacattataagcagcaaagggcatttaattttcatttctgttttagtttgtttgatgaatattagttgactgtttttgtattagacgtacattgttgcctttttgtcacacgagtgcggcaaaaatagcctctttttctttacctacgagattttcggagttaaaaaagcacaaagaaaagggattagagagaatatttgtaagcgttcttgcggaatttatagcaaatagaaaaaaagtagcaggcagacattcactgcaatcacaccaccaaacccacgcagtacccaccggcgcaacggactcttcccaccggcaaagaacaacgcatagcacatattcacggcaatattgctcacgatagcctgcatacaacaagctgtcaccaccacaacggcaacacccgaaccttgcagcaggttcagaataaatggagtgatatcactcaacccggcaatgaacgacaagacattcaatccacccgtaccggtataaatcaaagtataatgtgtcacaatggtgaatatcacaaacagaacggcaaaaatcagtgcaactttaaattccaacgggttactgctatcttcttcttcagcttcttcgcccgtcaccggaatcggcttacgcttccgatgcagataccaggccactcccgccgtaacgaaggacattataaggaggtatggataaatttccgcaagaatcgccttactgaatatacctattagtataaggaaacgaagaaacatcatactcactgccaacaacattgctgcggcatattccggcgcctcctgtgcaggtgccttgcgactcttacgtgccagaacagaaatagttgccgtactgctatacaaaccacctataataccagataccagaatgccggactcatgaaatacatatcgcctcagcagataagacaaataagagataccggatacaactaccgtagccaaccaaacggtataaggggtcaaattaatgtcgggtatcagattttcattcggcaacatcggtaagataatgccactgatagcaaggaacttggcgagagtaatcatctcgtcattcttcatgcgctgtgcaagttctgtaaaagtatgcttcaattcggtaaagagcaataccgtcacaaccaccatcacgtaaaaccaggagggttgtgtggccacaataggagcaatacaataagtgatgagtgcgataataatggtagtaaccccgaatacatggaactgagattgtttaacgtaatagttcaatcccagcagcagtcccaatatagcgccaccgcccataaacaagcggtaatccaccggatcaagaatataaagcagataccccaaaatacctataaaagtgaatgtgcggtccgtaccgaacaacgttgtctccccttcgcgcttcaaactgattttccgctgtgaaagccctattaataaagaaaacaaagtcaccaatacaaaggtcaccagttctctaggcaggtattcataaagtttctccatttcgtcctctgaatatacttgattagcaaccatttgcaaggagttaacttcctgtcaacaagaagttaactccttgttgacaaactcttaacttcttgttgacagggtattaaggccttaccaaacggtgtatggatgcttcatcagttgcgagttatagtaacggacgtcgcctgttacttcccgccctatgaaatccggtttttcaaaagcctcgtcttccgaagtcaattccacttcagcaactaccaaaccttcattttcaccgtagaactcatccacctcaaacgtatgccgtccgctgcgcaccagataacgagttttatcaataacacccggttcacaaagtttcatcagttcctccgcttcattcaatggaatctctttttcccactcatatcggctgagtcccgaggcatcggaagcaccttttatcgtaagatatccctttccgttacggatgcgcacccgcacggtccggcctcttgcactactgatataaccttgtacaatacggctttgttcatacgccctcgatttgtactcccccgtcacgaggaatttccgttctatttcttgcgacatctattagttatttccctaagaacgagtatcctatcagcatcaccagcaccagtatcaatgcagatacaccaataatcaacaacactttcttagcttgttcttcttccttacggctatgcataacctttttcttactctttcccataatgtgttcttagtattaaagttcaactgataacaaagtaacatgaaattcgggaagattccaaaagaaaagaggaaatttatttgtaacaagctaatatctgaaccatacccgaaccgtatctgagccgtacttgctccgtacattcttcggtcagaagtatctctgaacgaagaaagtacggctttggtacggagcaagtgcatctcaggtacggcagaaaggcatcccgaaccacctacaagtagttagtaaactactacgcagtaagtgcccacctacttacaggtagtttagtatttactacgtagtagtttttcgtcgctctaggttaaatgagatcaaatgatatttttaccttaaataaactatccgttttttgcttctcactttaaataaacatgtaaatttgtgatataatttataaaagttatgaaacaaggggcattactacaaatatatctgttatctatcatcttgctacattgtttttgtggatgcgaaaatcaatcttatccccaaacgttaatatcggcagattctctctcaagcgtgaatccggacagtgcaatagccatactaacagcaatgaaagaaaggattgcagccgaaaataaacaaacacaaatgtactatcagttgatatgtctaaaagctaaagacaaagcttatattacccatacttcagataacagtatacttcaaatattaaaatattacgaacaaaaagaagaaaaaaagcatcttccagaggcctattattatgccgggcgtgtttacagagatttaggagatacaccgcaagcattggattactatcaaaaagccttggatgtttcacaaagcagcaaggattataagttaatcagtagaatctatagccaaatgggaacattgtatctataccaaagagtatacaatgaagcattatccgttttcaagaaaagctataattatgacattttatcgaatgacagtattggacaaatatacagtttacgcgatatagggcgtacatttacaggatataataatgccgacagttctcttttctactatgaaaacgcatataagcaggcaagagagataaagaacaaacatctgacaaccattatttcaggagaacttgccagtctctacacacaattagggatgtactctcaagctgaagaagcaattcgcatttctatgcaggcaaaggaaaaaaggaatttagcatctcgcatctccacaatagccgacttatactttaagatgaataatcaagattcagcctattactattatcacaaattattagaattcgacaattactatactaaacaaggaggttatgaaggtttaagcaacatatgcaaacagaatcacctatataaagaggcattagattacgttgatttatatttagcgtatacagactccataaagaaacagactgatacggaaaccatacgtaaaatgcaatctttgtacaactatcaattgaaagaaaaagaaaatcaaaaactcaaggatataaacgccaaacaagaagcaaaggtaataggtctcatcttcatacttatactatcaataacaagtttcctactttattcacaatatacaaagcgaaagagagaacaaaagaaagaacagcaaaggcgactgcaagaaataaaagaaaggcaatattagaaaagtattgaattcatcgagcaaaatgcaaaacatattcattttttagagacacaattacaggttgcacaatcagaaaaggacgaattaaaacaagagttattagaagcacaaaaagaattgattgaaaatacaaataaacaaatagaagcagaacagaaagaacaaacactcttagaaagtaatttaaaacgatctgatatttatatccatttccaccaagctgccaaaaaccaaaccaatataacagcagcagagtggaacgatttacaagcaatgatagaccaaacatacggaatgttcactaaacggctttatgcgctcttcccgcaaattagtgagcaggaattacgcatttgtctattactcaaaatatcaatatcagctacaggcattgctaacctgacactgcgctctaaacaagctgtaacttcctcccgcaagaaactctacgagaagacgcatgggcaacaaggcggtccagagaaatgggatcaattcatacaagcattttaagtccaaggttatatcacaaattactacacaaaatcagaaccgtactaaaaccgtacaaagattctaaactagtccatccatatcagcatatatttgcggcttaaatttcaaaaaataaataatatgaaaagagaattagtcgcatttatgtgcattactatgtcattaacttcttttgcagggcataaagagaattggaatttcaaagaacaaaaggatattaaagttatagaaaggagttggggtgaagacaaacgctcaatttcttatgttcccaacctctcccataacggcaacattatctatatttactcagatattattttagaagacctacagattacaatactcaatgaattcgatagtatcgtttattcaagcaccattaccctcttcaacaaccaagactattcttttcaaattaacacaatgggaacaggaatatatactattgagctaacaaacggagaatactcactctggggacaattcacactttactaaattcaacaatatactaaatatgaaaaaactgctatttattgcattcttattttgtacaataacttatgtacacgctcaaaacaaaatcaagtattcctacgacagtgccggtaatcgtactaaaagagagattgtgttatcagccacaagaagtatactttcagaagaaaatgagcaagtgccttacattgaggaaatgcaaagtcatgaaatcaaaatctatcccaatccaacgaaagggattttaaacattaaaataacgggattagacaaagctaagggacttattagtgtttataatattgtcgggaaattaattgaaaagactgaactatctgacaataatcaaacttttgatctcagtgcacaacccaatggtatttatatcatgcaaattaggattgaagataaaatatctagttggaaaattataaaagaataaccatggataaaattaaactcaaaatagccatcattctggcaacaataaccttcagcggaaatgcctttgcccaaaccagtacgaaagaccttatcgggcttcccatcgacagtgtaggctttagcataacaatggatagtaccgacattaagaacatttctaaaacgtccaaattacaacaaacgacaagcagaatatcaggaaatgaacttcacccacacattcctacctcttattccattgataaaactaatgatgtaggtgaaataccatgtagctccactatttcacctacgggtgcaatgaccatcaacgtacccatagaagcatatcaaagccctaatggcttcacaccgcaaatttcattaacttataatagtttatccggaagcggtccattaggatgggggtggaatataaccggaacatctgtcatatccagagggaataagtcgatgtattatgacaaccaaacaagcggaacagagatcgagaatccgctttatgcagcattctacattgatggacaaaggttaatcccattctacctttcaggtggaaaattcgtattccaaacggaacaaggcaacatcaaggcgtatgcccaattggcaggagctgcagaatttgccaattttgaagtaaccttccccgatggaagacgggcgatatacggtacatccgacaaaataaactaccatatatcacaaatgactgataaatcgggagcagtagtcaattacacctatgctaaaacaggcaatcactacagaatagaaaaaataacttatggcaaaagcaaacaagcgtggatatcattccagtatacttcacggccatccgaaacacaaaggatatttaatgccggaagagaaatcatttacgattatcaactctcatctatcaccaccaacctatacggttctgcaataagaacatactcattaacatacacaacaagcggatatgtgtcgctcatttcacaaatagcctgcaccgcatccggaaaatctttaaatcctctgaaattttattatggagacaacaagcaaattaaagattttgacaaaaaagacactcagttaatgcactggtataacttcgaagaagctaatcaggtacgcactactaaagggaagtttgattatggctctgaaaatgacggtattataatgctgcccaacaaagcctcttatgtagaatattaccgaaaatctggaacatttcatcattcacgaaactattttgaaaaccaatatacaggagacgaaactataatcgtagctaccggacttagcggtgactttgccatatataatcctgaattgaaaacagaagcaggctttgttgatatattctgcatggatttagataagtttgatggagaagaaatcgtcaaagttaacaactacgtctcaggtgatatggacaagattgattttcatgtttatacaggcaatctactttctggaatagccaaaaagtatacacgttcttacagttttaacacattactagaccatagaggaactaaaagtatcaatcccaaatattactttacaggagactttaatggagatggaaagatggaagtattggtggtctcggcatataatgcaatggacaaaggggcaccaagcaaatgctatataatagacttagagaacaataaaatattgtatgaaggcagtcctttttcattttggctggcatttccagcttatcaagacaaaaacataagcggtgaagaagcatatgccctctccaataaattatataccatagactataatggagatgggaaaacggatttatgcttaataaatgacagtgaaactactattttttcattctacggtacaggcccagacatcagtagttgcaggaatctaacgtctgacagtcaactaaataattcgatactacgcgacagggaactcttactgggagaatttaatggagatggtaaatcggatttcatcctttcaccattgaaaagcaacggtacaacctggagcatcttttcctcaaaaggcaatggcctttgggacaaaaaagatattactatcacatcaagacttgaaacgtctaaatttatactacaagatatgaatgatgacggacagacagatctaattgaaacctatggcagttccagtaatgtatcattagcaacttattttatctcttatcaaacttataaaggttcaagtaacacaactataccaaaagagactgttttaattcctacaaatatacaaagccgtaattattacaataatcttatcagcttaaaaacaggaggaatcgcatccagattatactataagaatgacgactcccaaaatagattattaaccggaattatcaacagttatggtgttataacaaaggtcggttatcaacaactgaacgatgaaaccacccctctatacactcccggggcaggcgcagaatttccctatcaaaacttcaaggggggattaactgtatgttcaaatctggtagcctataacaatggaacattattgcgagaccttagctatttatataccaatgctgttatccacaaacaaggacttggtttcaagggatttgagaaaatacatgtttatgataatgttaccggtaaacatagttcgcaaacatttgacccccttcgtttttctgtcccggtggaagatgattctgacgaactatcaagtaaatatacatatagtatttctactgcatcaaacaaaataacgaatatattacttacacaaaaaacgacaacagataaatccaaaggtctgtcaacaacagggcaatacaaatacgatgcatacggtaacattactcaagaaataatcagttatggcaatgggctttctactacaaagaataatacttatcaaaatatcacaaaagatttggtatatatattaggattgccactcaccgaacaatcaataactgcacgcaacggaggaacatctacaaaccgtacagtaatgacgtataatactcaatattttcctatttcaaagacatattatgtagctaataccaataaaataaaagaagaaaagtttgaatataattcaatcaatcaattgatacgaaccagaaccaaatattactcttctcccaatgaacaaattgtcggatatgaatataattctaatgggcaacttagcagccaaaccgacccacttggtttaaaagaaacatatacttataatgggaaaggattactaagcgcagtccaaaatcacaaaaataaaaagacctctttcgattatgacccatggggcagaaagatcaaatcaacttatgcggatggaagcatttcaaccagcacagcttcttgggcatcttctcccacgaatgcattgatagttatcaatgagagttccaccggacaaccagatacacaaacatatttggatgctcttaatcgtgaggttagaacaggagagaaatgttttgatggacaatatttatatgtcgataacttatatgacaaccaaggacatctgtccaagacttcatatccttgtaaaggaaccccgggattatggcaaatttatagctatgataattatgacagaataactaaagtagtttatcctacaggaagacaagagacatattcttatagtggcctcacaacaacaagtgcaataaatggtatatcgaccaaacagatatataatgcgataggagatttaataaaggttgaagattcaagtggctcaataacctacaattatcgtcctgacggacaattatcttcaattattgctcctggcaatatcacaacatcttttagctatgatacatacggacggcaaacccagctaacagatccaagtgcgggaagtactacatttacctacgatgcagcaggcaacaccaattccaagacagatgccaatgggaaagccacacgtatgacgtatgatacatataatcgtttaacgaaacttgaatatgtgggtgaattaacgactaattatgcttataatacagatggtctgattacatctgaacagagcaataatggcacatccaagacttacatgtatgatgacttattccgtttatctgtggaaaaagaagtaatagttgatggaaaatggttgcaaaaatattacttatataataacggcaacatttcctctgtaaactatctatcacaatccggcaatataacaacagagtatttcaaatatactaatgggaatctatccgaaatcaaactcaacgattctatttctatttggaaattaaccggagaaaacaatcaaggactaccaacggcttataccaccggaatattaagccgtactcaaacgtatgacactgatggaagggtaacatctatcatcgctaaaaaaaatacgacttccatacaaaacttcggatgtagctttattgcaacgaccagcaatttagactggaggtcggatgcaaaacgaaacttgaaagaaaattttgggtatgacaacctaaatcgcctgacaacctttgccaagcagactgtagcttatgacatcaaaggaaatattacgaattcaagtggtataggcaagttcgaatatagcgcaagcaaaccctatgcaattgagacggtaacggcttcaggcaataccataccactacgtaatcagacaatagcatacaatgctatgctacgccccgtatccattacagaaaatgggtatacagctacgttcacttacaatggggatgccaatcgtgtcaaaatgttactaaagcaaggcaccgctgataaattgacccgatattatatagggaacaaatatgaactggataaaacggctaacagtactaaagaaaaactttatgtaggtggcgacgcatattctgctcaaacagttttagttaaaaatggtacaggtacatggaatatatattacctttgtcgcgatcacttaggcagtattacacaaataacagacgcatccggtaacattgtacaagaattgagttatgacgcctggggtaaactgagaaatccagctacacaagctatttatacaccaggaagtgaaccggaactttttttaggcagaggatataccgggcacgaacatcttgcggtctttggtttgattaatatgaatgcccggctatacgatccggcattaggacgtttcctaagccctgatccgtatgtacagaacccggatttcagtcagaatttcaatcgttacagctattgtttaaataatccactaatatatgtagaccaaaacggtgaatggttccttatagatgatttaatcgctgcagctattggtggtatattcaatgttatagttaatgccgtacaaggcaatatacatagtgtaggacagggattcgctctctttgggacaggagccgcttctggatttgtaaccatctatgcagggccaattgctggagcagcggtattaggagcaacaaatagcattatcaatcaaggattcaacaatggctggggtaacatagattggatgcaggttggcagttcaggtataatggggggagcaacttcttatatagggggaaatttaggtagttatttagcaaaaccaatcggtaaattaacggaaggaattgcaagtcccatattaaaagaggttttaacacaaggtacattaaactctgcaaccggttttggtttaggcacggctatggcattaggttcaggtgccgatcttggagaggcattaaaacaaggaggtcaaggtgcagcattaggtttagctaatggagttatgaatggaacggtcaaaggatttcaaacagccagacaagaaaaagttagtccatggactggagaacctactgaaggacatcattcagatcctaaattcatggggggagaccctaagcaagatttaaccccaatgagcaaatcccgccataaagatttacataaagacatgaataattatttaaaagagcagaaagatatgaacggaaatcatatgcgtccccaaaaagggaattcaggaaaagacatacaaagaaatttcgatagacaacaacgaattgatgttttgaaaggtttctataataaatacccattgaagtattgggatcctaaattagatttttacagaaataataaaatgatgaagcaatggagaccgtggtagctaaaacaatatctgtaccagatatagaatatatgtatgataatgaaaacagaccgggcacgtgcccggtctgtcataacacattagaaaagattcctgatattcattataaagtcgctaaaaagaaagccgatatattgctcacatacgacggctactatattgtcactgaaaagttcaaagctttttgcaaagaaaataaatactccaatgtgtgttttactaaactgacagactctactggatattacttttttatgccacaagatatttacatattagattatatccatcgtaaaactcgatttttaaataaaagagaatgttgtggaagttatgatgaaattattggagcaactcctgcatataagctctcaagtttctctactgaatctaatgatttcatcaatcgttcagaatattattttggtactaaaggctgtaaagaccctctcattatcattggtttagaaactgaacaaaaaatgaaggcatttggcataaaaggggtaagctatattaatgtttattctatcgaaacaatttatggaaagtctaagcccatagatgaagtaacattgcaagacatgcaagaaaatccgatttggatatttacattagacgaagaagattcggatgaagttgatgagagctggttaaagccaatattgaaatccgacaatgtgatgagtgaatttgtcgaagcatatattctgctaaaaagcacagatggtcaatatgacatatcagcaaatctggatattaaaaaggaggctttggatgatgtaaccttttggaaacccgaacaacagtgctggattccgattgaaaacatcgacaactacagagaaatacaactcatagctgttcctaaaatcgaaaaagaaaacgatatcctctttgaatttgacagttcgaagaatctattcagttctttaagaagtcaggcacagctgaaagagaaaaagaaaactattttttctttctttgtatcattatttaaacgaaaataactctggcacacaacatgcaaaaagtagaaatcatattatcgtcaaaagagtataaatacctcatttacactcttttgagtaagcacaataatctgctcagcaagattaaagtttcatcttcagcagatactaccaagctctctttagatgaagatacagcatatgaaatccgtgaattggcaagtgatgaagtcgcattgcattttgatgagaattatacgcctacggaagagggctggatattagaacatttcatcgacaaattttactttgaatattttttttccggtttggcaagttgctgcatattgttcttcccggaatacgttttcgcaagaaaagtgttcttttcaaaagacgttttcttgcgaaaaatgtcttttgaaaagaacaatatcactttctctcacgctcttgaaaacaaaaaatgggtgccactttcattcatcaagtgacacccattctctttatatagaaataaattttaatcctcttgtccagcaaactccatcagatacgccttaatgaaaccatctatcttaccatccatcaccccattgacatccgaagtctggaagttagtacggtggtcttttacacggcgatcatcgaatacatagcttcgtatctgcgaaccccattcgatcttcttcttcccagcttccaccttggcttgttctgccatgcggtgctgaagttccttatcatacagaatggaacgtaactggcgcattgcattctcgcgattcttgggttggtcgcgagtttccgtattttcaatcaggatttcttcttcctcgcccgtatacgggtccttgaactgataacgcagacgaactccggattctaccttgttcacattctgaccaccggcaccactggaacggaaagtatcccatgagatattggcaacattgatgttcacctcaatagtatcatcaaccagcggagttacaaaaacagaagcaaaagaagtcatacgcttgccttgcgcattgtaaggagatacacgcaccagacgatgtacaccgttctcgcctttcagatatccataagcataatcacctgaaatctcaatagtgcaggttttaataccggcttcatcaccttcctgcaagttagaaatgacagccttgtagccattggtttcggcataacgcaaatacatacgcatcagcatacttgcccagtcctggctttccgtgccacccgcaccggagttgattttcaacacacagtccatctggtcagcttcatcacgaagcatatttttcagttcaagctcatcaatggcaacggaagctttggcataagcttcatctatctcttcctcggttacaagttcgtccttatagaaatcaaaagccaattgcaattcatccgataatgtctttatttcattataaccggctatccactgttgcaaacctttcactttcttcatttgtgcctcagccgtcttctggtcatcccaaaagcccggagcctgcgtgcgcaactgttcttcttctacctggatcttctttccttcgatgtccagatagcggtagagtgcctcggtgcgctctttaatgcttttcagttgttctatggtaatcataatctatgaaaataaaccttcttatttaaaatatttactttttgagtgcaaaggtatgaaaaaaacgcatatttttgcagttatcaatctaataagtcagcttatgaacaaactattccgacaaattggtttaacgtttatcctactggtagcgataagcttaggaagttgtacttcgaagtacagctacgaaacagtacccaatgatccgctgaaagcgcgtatctacactctggacaacggtttgaaagtctacatgactgtaaacaaggaaactccgcgcatacaaacgtacattgcagtacgtgtaggtggtaaaaacgaccccgcagaaactaccggattggctcactatttcgagcacctgatgtttaaaggtaccacaaacttcggtactcagaactatgagattgaaaggcctttgctggaccagatcgaagaacaattcgaagtttatcgcaagacaacagacagccttgaacgtaaagctatttatgcaaaaattgacagcatctcctacgaggcttccaaatatgccatccccaacgaatatgacaaactcatggctgccatcggtgccaacggaacaaatgcctacaccagtttcgacgttacttgctacacggaagatatccccagcaatcagattgacaactgggcaaaaattcaggcagaacgttttgaaaattgcgtgatccgcggtttccatactgagttggaaacggtttacgaagaaaaaaatatgtcgctgacccgcgacccacgcaaagtttacgaagcagtactttcttctcttttcccacaccatccttatggaacacaaaccgtacttggtactcaggaagacctgaagaatccttcaatcaccaacatcaaagaatattataagaaatggtatgtgcccaacaacatggctatctgtctttccggtgattttgatcccgatcagatgattgcaaccattgacaaatattttggtggtttgaaaccaaacactgatctgccgaaactggatctgccgaaagaaaccccgattacagcacctgttgtacgtgaagtaatcggcccggatgccgaaagcgttgcccttgcatggcgtttccccggagcggccgacaaagatgtggaaacgttacaagtggtttcccagatactctataacggacaagccggcctgttcgaccttgaccttacacaacaacagaagacgttaagttcatattgctatcctctgactatgagcgattacagcgcactgttgatgcagggacgccctaaacaaggacagactctggacgaagtgaaagacctcatgctgggtgaactgaagaaactccgcgacggcgacttcgacgaaaagatgctggaagccaatatcaacaacttcaaactgtatcagatgcagcagttggaaaacaatgatgcgcgtgccgacatgtttgtacagtcattcgtaaacggtagtgactgggcagacgaagttaccgccctcaaccgcatgtccaaactgaccaagaatgatatcgtagcctttgccaataaatatctgaaagatgataactatgccgttatctacaaaagacaaggtaaagacccgaatgaaaagaagatgccgaaacccgaaatcactcctatcgtgatgaatcgcgacaccgccagtaccttcctgaaagaaatacaggcaagcgtagtgactcctatcgaaccggtattcctggactattccaaagatcttacccaactgaaagcaaaatcggatattcctgtactttacaaacagaatacaacgaatgatattttccagttgatttacctctttgatatgggtaacaacaatgacaaggcactcggtaccgctgcccaatatctggaatacctcggtacagccgacatgactccggaagaagttaagagcgaattctatcgtcttgcgtgctcattctttgtatctccgggtagcaaacgtacttatgttgtactctccgggctcaacgaaaatatgcctgctgccatggctctcttcgaaaaactgttagcaaatgctcaggtaaataaagaggcttatgcaaatatggctaacgatattctgaaatcccgcaaagacgctaagctgaatcagatgcaaaacttctcgcgcctggtgtcttatgctacttatggtccgaaatctccggcaaccaatctgctgaccgaagctgaactgatctctatggatccgcaacagcttgtggaccgtatcaaacagttgagcagcttcaagcaccgtatcctttactatgggccaagcaatcaggatgacctgcttgccatcattaataaagagcatcaggcaccggaggctttgaaagaaattcctgaaggaaataactttgaagcactattgacacccgaaacgaagattttcattgctccgtatgatgccaaacaaatctatatgtcgcaaatctccaacaaaggagagaaatttgatcctgctgctgaatccggtcgtcaactatacaacgaatacttcggtggcggcatgaattccatcgtattccaggaaatgcgcgaaagtcgcggtttggcttactcggcatgggccggtatgttgaagccaagctatttgacagatccttatatgctacgcacacagattgctacgcagaatgacaagatgatagacgccatcaatacattcaatgacatcatcaacaatatgcctgaatcggaagctgccttcaaactggccaaagacggcatgattgcccgtatgcgtaccgaccgtaccatcaagatggatgttatctgggattatatcagcgctcaatatctgggacagaacgtagatagtcgtatcaagctgtataacgatgtgcagaacatgacgttacaggatgttatcgactaccagaataaatggatcaagggacgcacctatacatactgtatccttggtgacaaaaaagagctggatataaatgctttgaaaaaagtaggtccggtaattgaactgaaacaggaagatatcttcggatattaatatatctgagcagtaaaacagggaaagggttgcattgtcatgtaaccctttctttttttataatttctaccggttctatttataaatactctttattacacaaaaagtccaccctccccgcactgtgattacgtacatttgccccgtattctaatttgtatcacatatctaaaagagtataagacagaccatgaaacgtttattcatctttattatgggagtaatgatggctgtggtagccacgtcccgcacgttcgacatgaaacaattgggggctgatgccaaaggcatcaagccatgtacgaaactgattaaccagactattgaaaaagcagcttcggaaggaggtggaaccatctatttccctgccgggacttatctgactgctactatccacatgaaaagtaatattacattgcatctggaatcaggtgccattgtgcgcttctcagacaggttcgaggattatctgccttttgtaaccgcacgttgggaaggaaccgttatgcaaaccttatccccactgatttacgctcattcggcagataatctgaccattaccggacgcggaacgctggatgggaacggactgaaatggtggttatgggaatttgagacacgtaaggtgataaaggagaacggtggcaagctaccttctctgaataagttacaacaaatgtgggtggatgccaataaggacctggaaatatccgattactataagccttctctggaacgtaaaatgttccgtccgccttttattcagttctacgaatgtacgaatatccttattgaaaatgtgaagatcatcaactctcctttctggacagtcaatccggccttctgtgataacgttacaatacatggagtaaccatcaataacccgtcaagcaatcctaaagggccgaatacggacggtatcaatccgagttcctgccggaatgtacgtatctccgactgttttatcagtgttggagacgattgtattaccatcaagtccggacgtgatgccgacgggcgtaaatatgggaaagcatgcgaaaacatcacaatcaccaattgtatcatgctttccggtcacggtggagtggtcatcggcagcgaaatgtcgggcggtgtaaaaaggatagctatatccaattgtgtgtttgatggaacgaatgccggtatccggttaaaagcatcccgcggacgcggtggtgtagtagaagatatacgggtagacaatatcgtaatgaagaatatacaaggagatgcctttattttcgatttattttatgaccgtttatcgaaagtggaaccggtaagcgaacgtactcctattttccggaatatccatttaagtaatgttacgggaaatgatatcaagcggataggctatataaaaggtattgaggaaatgcctatatcggaactgtctttctccaacatgaacatagtagccggaaaaggatttcaagcagaaacagccaccgatatccgttttaacaacgtaagtttcaccgtagaagaaggaccttcactcaacatccgacaatgcaaggatatattcctgaatgacgtgcggacaaagcaaccgatagccggtcagccggtagtggatttagaagcaatagaaaacctgtcaatcattcattgtgattccacacaaattgtcaggaaataatagaagaaaaacaaatagaccactcaaaaaaaatctataatatggcacaccgtttcttaaaactctcattagtctgtatggcaatcatagcaagtacagacttaaaagcccagcaagcgccggtcttatggtacgacagcccggctgaatattgggaagaagctctccctttaggtaatggaagattgggagcaatggtatatggaaatccggtaaatgaagaaatccaattgaacgaagaaacgatttctgccggtgctccttacaagaactacaatccggaaactaaaaactatctgtctgaaataagacagttgatctttgaaggaaaatatcctgaagcccagacattggcgggtgagaggcttctctcgaagaatggttttggcatgccttatcaaacagcaggcagtttacggttaaggtttcaggatcaggaaggttatacaaacttccgccgggagctggatttggaaaaagccgtcgcatcaaccacttatacagtggatggcgtcgactacaaacgtgaagtattcacttcatttgcagatcaattagtcatcatccggctgaccgcttcacaaccggggaaactgacattcaccactgctctaacatgcccgcaagatgtcgacgtcacaacttccggcaaagacgccatgactatggagggagtgactaaaggaaatgagtttgtaaaaggggcagtccgcttccgcacagatttaaagctcaacgtacagggagggaaaacctctgcaaatgattctaccttggtagtaactcgtgcaaacagcgccacaatttacctggcaatatccaccaatttcatcaattacaaagacatatccggcgatcctgtcaaacgcaacaaagtatacttaaagaatgctgggaagaattataccaaagcacttcaggctcatataagtaaatatcagaaatattatagtcgcgtatcgttggatttaggccgtaccgcccaagctgacaaaccaaccgatatacgtgtcaaagagtttgccacagccaatgatcctcacctggtagccctatacttccagtttggacgttatcttctaatctccagttcacaaccgggagggcagccggccaatctgcaaggcatttggaatcagaagctaaatccggcatggaaatgccgttatactacgaatatcaacgccgaaatgaactactggccggctgaagtaactaatctgcccgaaatgcacgaacctttcctgcaaatgataaaggaactctatgagaatggtcaggaagctgctcgcgaaatgtacggttgccgtggatggatgttgcatcataacactgatctgtggcgcatgaacggggcggtagacaaagcatattgcggtccctggcccacttgcaacgcttggttatgccatcatttatgggatcgttatctgtattcgggagataaagattttctggcccaggcatacccgatcatgaaaagtgcttccgaattctttgtcgatttccttgtcaaagcccccaacacaggttatatggtagtcaccccaagtaattcaccagaaaattcacctccacaatggagaacaaaagccaatctctttgcaggcatcaccatggacaatcagctagtatttgatctattcacaaatacagaaagagccgcacggctattagagaaggatgagctattctgcgatacgatcctctcactcagacaacaattgcctcctatgcaagtagggcaatacggacaattgcaggagtggtttgaggactgggataaccccaaagatcatcatcgccacatttctcacttatggggattctttccgggattccagatatctccatactcctcacccgtactctttgaggctgcacgcaacaccctaatccaacgtggtgatccttctaccggttggtctatgggatggaaggtttgtttctgggcaagatgtttggatgggaatcatgcattcaaacttatcactgaccaactcaatctggtctcccccgaagtccagaaaggacaaggaggaggaacctatcctaatcttttcgatgcacatcctcctttccaaatagacggaaacttcggttgtacagccggtattgccgaaatgttaatgcaaagccatgatgaagccatacacttgctacctgctttgccagatgtatggaaggacggtgagataaagggacttcgggcacgcggaggctttgaaatcatttcattgaagtggaaaaacgggcagatagaatctgccgtgatcaaatcgactctcggaggcaatcttcatctacgtgtgcatcaggagttggctatggatggaaaaagtttatctgctactgacaacggtaatgccaatcctttctttgccaagcaacccataagccgccccttgattagtgaaaaagctcctttgaaaggtattgagctgaagaaatcatacgtttatgaagtcgctacccaagcaggagaaacttatacttttacgaatgtccggtaacaggtaaccggacgttctttgtcaagagcatatttacagaagattaacggacgggaggcatagacctcccgttttactttcggaacagaccgtctgtttgcctcaaacacatgatcagtatgcctcaaacgtatcgtctgtttacctcagatgtatcgtccgtttcgctggggtaaatcagtgaaacgccacacctcagcaagtgaaacggctgggcttaaaacggttgaagtgtggcatttaggttgttgaagtgtggcatttaagctgctaagctgtggcattggggaagtaaacatgtggcatttcaaatgacaagccataaggataaaaaaagaacggagaagcaatgcttctccgttcgtgctaatttaaaattgaatattaaatagatttacgaatacaaatatacgacatcagaaaggcgatgtcaagtatattgggatttttctcactttccaacaattattttatagcaatcgttgttcgctgcaaatcttcttctttagagcttcctcccaccataatatcataattacccggacaaactcttactgtattggattgatcgtcccaccactccaattctttatctttcaggtcaaactccacattgacggtctttcctgccggaatagatacacgcttgaaagcacgcaaggttttgatgggtccttctgcatctccttgttttctaagataaacctgcaccacttcttctccgttacacttgcccgtatttgtaacaggtacagtaagtttcaaagactgtccggctgtaagttcattcttgtcaagtacggttttaccatagccaaaggtggtataactaaggccgtaaccgaatgggaacaaaggcacatcctgcatatatctgtaagttcttccggtcatgttataatcttcaaagtcaggcaactgagacacattgcggtagaaagtaaccggtaatttccccgccggattataatcaccgaacaatacctcggcaacagccttaccaccttgctgaccgggataccatgcctgcaagatagcttcgcacttctgagtctcaggttccaaaccgataggcgatcctgaacagttaaccagaataatcttcttacctgcacgatgcagagcatcaatcagttcacgctgaacggcaggtaactcaatatccgtacgatctcctttcttgaaaccgggaagatttactcccatctcctccccttcaaggctgggagatataccgctcgcaaaaataacgatatctgcatccttcacacgttcaacagatttccttatatccacatctttcttaaatccaagatcaaagttcaactgtgcatcacttctcagatactcaaaatcaagttccagatcatacgatttaccagcctgtaccttcatcgcatgagtagatttccttgcaccgtgcttgtttgagaaacttttcacttcttctccgttcacacgaagtcttccgcttccatagcaataaacctcaagaacaatttctcctgattctttaggaataaatgcactgttataggttgcggagaaatccgtcaaattcactcccggagcaaacactgtagcccccgaagtacaaaagcggaaaggagtggtgacttgtgctgtggtcaccggttcgccttcacgcttcaggttattccagtaacgagccgtgaacccaggacctttgtctgacttacactggctgaatgcactctgaatcagagttctttccacccatgggcagccttgctcatagatcagtttatcatcagtgccaagcaaattccgcactccatcaagaatagtgacggtgtgcgccggcattccgttataatttccccattgcatcactgagtcattcgcattcggccccataacggctaccgtcagtccgccacgtttcaacggcagaaagttatccttattcatcaacaatgtcatggattcacgggccatattcaatgccagagagtcatgagcagcagaagctactacggagaaaggtatcttggtccaggatactttttccggttcatccatttctcccaatgcaaaacgggctttcatcagtcgcttgacagacgtgtctacggtctcttctgaaattaatccttttttcacgctctctatcaaagccttataactggaaccacactccaaatctgttccactgatcaccgccgcggcagaggctgactctgcatcgggatgggtgtgatgaccacggtcgttgtagaagtcagctattgcaccgcaatcagatactactataccgtcgaatccccattctccacgcaatatctgcatcagcaggcgatcacttccacagcagggatcaccttcaaaacggttgtaagcgcacatcacttcttccacttttccttctttcaccaatgcttcgaagggtggcagataagtttcatacaaatcacgtggctttatattctccgcattaaaagagtgacgattccactccggtcccgaatgtacggcaaaatgcttggcgcaggcatgcagtttatcatattttccatcggcaggtccttgcaaaccttttaccaccatcacgcccatccgacttgtcagataagggtcttcaccataggtttcaatacccctgccccagcgcggatcacggtagatattcactgtgggagtccacatggtcaaaccctgatagcgttcacggctatcctgagatgcgtagtaggtattcttcgcacgtgcctcatccgacacggcattgaacacttcgtacaccatttccgggttaaaggacgctgccatacctatcggctggggaaaaaccgtagccaagcctgcccgggcaacgccatgcagcgcctcattccaccagttatacggtttaatacccaatcgttccacagaacgggaaccatccatcataagatgcgccttctcttccagcgtaagttccttcaccagaagttccgcccgcctttcaggagataaagaagcatccttgtaggatgactctccgcaacttgccaaagcaaggagaggcagtaagtaaaaaagtttttctttcatcatttctattctatatttttacaaaaataatatatcaaaggaaatagtacgacaaaaactgcaagattttaaatccgatggaaatgaaatcctgcagttttctcaaagctctatactaaatacttattattgctgtggcagtccatagccatttgtcacttttcctttggattgactgattgtttcataaggaataggccagtaataacacggaacactctcttccgatgtaatgcccggaagaatattgctcagatatatatcaatattggcagcaagagtgcttccccactctgtcttcacatatccttccgcttctaattctgccgcagtctcactatccggagcaatatattcaaataaccctttgatagcggtattatggttggttccatttacagacaatcctaactgagcaaaatccaatacaccacgccatcccgggaaaagtacaggatcattttcatccgtacagtcataagtcagtttggcacctgcaacctgctttgtccagatgtaagcgggtaagatgttgccattctcaaattcatgataacctttagtcttcagattttcagcaagtgttgacatctcattacgtacttccattgctttttgtgagaatttaccactccgaaccagatcgtaactggtatgcccttcaccgaaaagttcaaacttacgttccatcagaatagcttctttcagtgcttcaccggacaaaccggaaatattatgcaaatcatctccaaaagctctttcacgaatctgattaaccaagcctatagcttcagtatctgcatccaatcctgctttcacttccgctaacatcaagatgacatcagctacacgcataatcggtatattgaaacccgcgcccatctgaggaccgacaaagtaaggattttggcggcaaatatcccatttattcaagcaaatacctccatcaaccttagcacccgccttaaaagtaaatgccaactcattgcctttaccatccagcccggtaaccactgcactgacatcgcgacgtttatcagcgttatcataaccaccataatagaaactcggcaccatacgtataccggcaaataccttattcggggcagtattgttaccaccgttagagccacgaccaaaatcatagcaatacatacggcttgtagcttgattttgtacacaacctatttcaaagatagcttcaggactcatcagaagatccattccgtattgaaaatggcgttggaaaggattgttcgcatagctacgctcatccgtagtaaccagtttggtagttcctgcattggttgaaagagctttctgtaaatagtcttcagctatagtgtaatagttcttgtaatcggaacgacgggcataagcgcatttacgtttagcatccgtgctgagagtttcgaactgtacacttccataaaattcaggcatatcagtacggattgtttgatagcctccggcataaagagccattttgccaatcaatccatcaacaaatgtccgcgtaatacgctcaccgttcaaaccgccttcacctactttatacatatacggttccgctgctttcaatttttcaatcaatgcatcataaatatcaaaacgtgaagccagcccgtaatcatctacataattattctcatagccatacggtacatcaccacaatgtttaatcaagtcaaagtaacataatgcacgtaatacttcggcttcacctttcagatgtgtccagtcagaagtcctgcctgctgcgatatcatcctgataagctgttttggcagcaatcaggtcagcggtctttccggcataggaaatcacattgtacagagcattgaagctacctttcatgtgatcacaaggaatctgttcgggaaccagctttgcattgatattattggaagtattattctcggggaaatattcgatatccgaacggtaatggtcgttccaatcgtatgccccattacacgattcacgataaagtgcataagctcttgacaaagtcttcagagtttctgcgggactggaagttacaaactcgtcatctgtattagaaggagaagaagtttccagaaagtcactgcactgtgcaaacaagacgcaacaggctgacgcaaatgccatttttatatacttattcataatttcatcttttatttaaatggttagaagctaagatttacacccagtacgaaggaacgggcacgcggataagtaccccagtccatacctaattgaggataggtctttgtagaagtagacgtacttacctcagcatcaattccggaatatcctgtaattgtaaagacattatagatacttccgtaaacacgcagattactgatacccgccttctgaagcatactcttcggtaaagtataccccaaagtcagtgtattcaaacgcagataagagccgtcttcaatacccaatgtagacacatagccattctcactgtatgccagtggtaacttagcattcgcattggcagcattcagctgttcaggagtggtcaatgcaaccaattcgccattcactacatcatagattttatagcagtcctttactatagagagcttattctcgtaaacggcaccttctttataaccataaagtgctgccaacttatttacattataaatttcattaccatagctccagttaaaatacaaacctaaatcaaagttcttataagtagcattaatattaaaaccaccggtatggacaggtgtcatatcgccgataacgtccacgtcatcatcattgataataccgtcatcgttcaggtctttgaactttgccatacccgggtaggccaactgtcctgcagggcgttcgttcataccattgtgtaaatgatagttagggaatacagcagaagaaacatccgcaactccttcttttagagtatacaccccattttcataagtgaaatcgtcggtagtatagaagccatcagcagtcaagccacgtaccaagcctacagggcgcccttctttcaagacataatctgatttcgggaaagtagatgaagtagcccattccgtaccataaagtccagtgacattatcagccagtttgtccactttaccgcgattgaagttaatattaaaaccagccgttacattccagtccctcgttttcacgagtacaccctgaagagcaatttcaatacctttgttgctggtctggcctacattggcgtaggttgaagtgaaacctgtgatacccggaatagctgtcttcatcaacaagtccttggtggtattccaataggcatcaatcgtacctgtcaagcggctattaaagaaaccgaaatcaacaccgatgttacgggtaatcgtagtttcccacttcaggtccttgttcgccatatctgcaccaagtgaataagaaggcaagaaggcaccattcacggctccctggtatctcttgtcactggtagcctcccaattctgtgaccacaaactggaatttataccatcgttacctacctcaccataggaaacacgaagtttaaggttatctagccagtccacatcgttcaggaatgcttcttcagacatacgccatcccaaagcggcagccggaaaatatccccaacggttactgggagcaaatttagatgaaccatccgcacggaacgtaaccgtcagcagatagcgttccataaggttataattcaaacgaccaaagaaagaaaggatacggctcggcgtagaaacacttgaagagaaatcccccactcccttagtactatcgtattgattgatcatggcaaatgcattctctttcgtaaagtttgcagggaaataagttcctgaggctttcagcccgtcaccgcccgaatcggaaacttcatgaccggccagtatattcaaacgatgtatcttacctaaagtaaagtcatagctcaaagtatttgtccaacggagtccccagctattctttttctccagattcgcgttacctgcatataggacctcaccggtattatcatccagatagttatttatgatggctcccgtccattccttattctgattccaagtctggctgagagacaggtcagtatgataggttaatcctttcacaattccccagttcagcgaaagaataccacgcaatgactgctgagcattcggtgcatacttatcattgatacggtttaccggattatatctgtcccactgactctgtttggcatagttctcaatcataccttcattcattgcggatagatcacccaaaatatcttctgttgcaattggacggaagcgataagaagacgacaggatagacccgctaccattcgtaacaccttcatcacccatctttttaatattggtataacgggtatcaagactcaaatcaagattcttggcaatcttttggttcactttcaacgaaacattggcacgtctgtagtaagaagcgagtttcataccatcttcatccatgtagttaacaccaaacagtactttggtcttttcagtaccacccgtaacagaaaggtcatgattatgggaaaaagaatctccataaatctttttctggatattatccgtctttacattacgatagctttctataccaccgggattggtagtcgtataacgtcctattccatacagtttctccaatggttccatatagctgttaccaccaaccgaagccgcacttgcccagctatatgccaggtagtcataaggattgagcgcatccatatacttagtcggtgtattgaacttcgcataaccattgtagctgacaacaacacgtccttctttagccccctttgtggtaacaagaattacaccattagcaccacgggcaccataaatagccgttgatgaggcatctttcaaaacgtcaatcgactcaatctgatcgcccggaatatcactcaacgaaccactgactccatcaatcagcaccaacggatcattgctctgtgagatagaaccgccaccacgtacacgaatagaaacagcggcatcgggacgtccatcctgcgttgttacatttacaccagccagcttaccctgcaaagcctgagctgcattggcaacaggcatagctgcaatttgctcacccgaaacagaggctaccgatccggtaagatccttacgttttaccgtctgataaccgattactacaacttcatccagaatctcagcatcttcagccaatgtcacatgaaccggctgccctgcaacaatagatactgtttgcgtctgcattccgataaaacttatttccaattgtttggctgtacctggcacggcaagggagaatttaccatccaagtctgtaattgtaccgatagaagcgtcgcttactactctgatattagcaccaataacaggatcacctctgctatcgagcacaacacctgaaacagtacgactctgtgcaagagagataaggcagatcatactcatcaagagagtagcagctgtcctttgaacaagtctttcaaaattcataagtaatgtgtttttaatagttaatgattaaaatgattcactccgcaaaagtagccaacctgtgtcatagcaacggaataaaatcaggtaacaagagtgtactttttcaaaatgggacaaaaaggaggtggactattcgggcgaaatatcgtttttttcggtcaaacaaatcctatacttttcatttattcccttttttctatacatttgttctgcactattcaaaacagtactatgagacgactgattatctacttcttatacttaatgataccgatgttttcatcggcgcagcccatctgccagattactgattttacagcagagaacggactaccccaagatatcgcatcagcagttttacaagatcagaaaggctttatctggatctgtacccgtaacggactcaataagttcgacggatatacattcaagaactacaaatccgcgccacataaagaatatacactatccaacaatcggataacctttatttcagaaaccgcatatggcgatatctggtgccagacgtatgacagcaaggcttatatattcgacacgcatcttgaaatcttctatgatgttctgcaaacagtagataaagatatgcaaagaagaaactttgttcagaaaatatttcccctaaaagaaggcatagcctgggtaacatgcgacaagggttattgttacagaatcgatgaaaagagatataaagaaaaagacggaattacactctatagcacattcaatggttttttaaaaggcgagcacatcttcactatcttccaggattccgataaggatgagtggatattgacagacaaaggtatatccattataggcaacaaaaagatcgacagtgattttcctttccagtttattcaggaatacaacggtacaatttaccttgcttccgcttctgaaaagatagcctattataaccaacaaactgaaagcataaaatttatagagtttccttaccccatcaacaaaataagctctttagacataaccaaccacgggctactcaccatatccactgataatggtgtcatcctgttcaatccggaaaataagacttctcagctaattgatatccgtactcccatgcaatcctccaatgaagctatctccatttatgaagataaagagggagagctatggatattccccactactcccggagtgatacgctttaatccggcaacaggtgaaaagcaatacctctttacacccccaaaagaggtcgtgaattatggcagagagaacaaaaacaccatatttgaagataaacaaggtactttatggctgattccccataatggaaacttctgttattatgataggaaaaataaagaattgaaagctttttatacagacccggacaatcctcaatcgctatttgccccgcttgttcgctaccattatcaggacagacaaggaaactactggctagccagcgccagaggaataaagaaaatgtctttctatccacaaatttataatctgaaaggaatagacaggggattcgaaatccgtgctttccttttggatagttcacaacgattgtgggtagcttccaaaagcgaatatgtcaggatataccaccctgatggcagcctggccggttacttgtcttcacagggaaagataggtaaagataaagtatcattcaatgccagtgtttacagcatctgcgaaggaaagaacggaacaatctggataggaaccaaaggaaacggcctattccaactcacaaagaaagccgatggaaattacaacatacaaaattatgtgtatgactctgaagacctatatagtttgagttacaatgacatatttaccatatattccgataatcatgacaacatctgggtaggatgttacggtggtggattaaatctgctacaacaaacacctgagggaaaagtgtattttatcaaccacaggaataagctacaaaactatccgttcagcacctgtcataatatccgctatattacaggtacggaaaatggtatcctgttggtaggaaccacctttggtttagttacattctcaaacgactttgcgcaaccggaagaaatcaaattctacagaaatatacaaaacaggaacaatccttttagtctgacaggaaatgacattatgcatatatacaaaaatagccataaagacatctatatattgacattcaccggaggagtcaacaaaatcacatccagaaccctacttagcgaaaacattggatttcagtattacaccgagcaggaagggctaggatccgatatggtcctatccatgatagaagattcccaaaagaatctgtggatagcatcagaaaatgctttatccaaatttaatccggaaacagaggcattcgaaaactatagtacaggatttctcagacaaaagatgaactttagcgaagcgatacccaccataaacgcccggcaacaattgattttcggcacagatatgggctttctggaaattgttccggaacaaatgaagaagagtgattatgtacctcctatcgtctttacagatctgaaagtcaacggaaagaaatcaactgtttccaccgatgatttgaaagagatagccttacatccttcggaacgaaatattaatgtacaattttcagcattagacttcacaagaccggatgacatacgctatgcctatcgtctggaaggtcttgaaaaagaatggaattatagcgataaaaacaaatcagcaagctacatcaatctacccgcaggcgaatatcgtctccaagtgaaatcaacaaacagtgacggagtatgggtaaacaatatccgtacactttccatcaaggtcattcctaccttctgggagactccttgggctttactggcatatctagcagcattcatccttctcacagggttaattctgtatatcttctcttacatctatcgactgcgtcaccaagtgaatatggaacagcaattatcaaatatcaaactgaaattctttaccgatatttcacacgagctacgcacaccattgacccttatctccagtccggtcagtgaagttctggaggaccagaccatttctccttccgtgcgggaacacctgaccgttgtacataaaaatacggaacgtatgttgcgtcttgtcaatcagatactcgattttcggaagatacagaataagaagatgaaagtaatggttgaacaaacagaattgattgctttcctgatgaaaattacagaaaatttccgtctgatagctgaagagaaacaaatagacttcacattcaaagctgatcaagaagaagtatatatatggatagacagggacaaagtggaaaaaatagtattcaatctgttatccaatgcattcaaatatactctacctgggaaaaccgtaaagattacagtacagaagtcggatcagcatatccgcatttccattattgatgaaggtatcggtattgctcctgataagataggttctcttttcaaacgctttgagacactaagcaagaacaacaatattctgcaaccttcatcaggcataggtttatcactcgtcaaagaattggtggatatgcatcacggagatatagaggtcaagagccaaccgggaacgggtagcgaatttagtgtaactttacctttggaacgtgaagtgtttgagaaagatgcacaggccgaattaatccttgctgatagttcggacaatacagaatatattaccacaactgtagagaacggcatagctgaatctggaaacagctcggaagaggattttttatccattttaatcgtagaagataatcgtgagctgagaagcctgctcagaaatatactatcaaagaaatacactatcctggaagcagcaaacggagaagaaggtttgaaacttgcatcggaagccatacccgatatgataatcagtgatgtaatgatgcctgtcatggatggattggaaatgattaaacatatcaaggaaaacaaagatatctgctatgttccaatcattcttctatcagcaaaagcatcattggatgaccgtatcaccgctttggaacaaggtatcgatgattacattacgaaaccattcagttcttcgtacctcaaagcccgtattgcttctctgtttaccaagcgtaagcagttacaggaaatattcatgaagcagttatcagcaaacaatgaaaccgataattctaaggaatggactccttcggaacccgaagtgatgccgcatgataagttattcatgaaagaagtgatggatttcctggaagagcaaatagataatccggatctggtgatcgacgatttcgccaacaagctactgctaagccggagtattttctaccggaagcttaagtccattgtaggaatgcctccggtagattttatcagggaaattcgtgtaaaaagagccgcccagctgatcagaagtgatgtatacaacttctctcaaatagcttatatgaccggtttcagcgatccgaagtatttcagcagatgcttcaaaaaacacatgggagttactccaagtgagtataaaaactccattaataacgaggagaataatccggatcagtaaaagacaaagttctttatagcaagtccctgactctgtccacggaacaggaaataaattttggacttatctttcactgctccactgacctcaaaggcttgcttctcccattctcccggagtctggttctgatttatcgggcaagtggctatcaacttcccatcgagacttccctcccttatctcaatcactgttccgggagtttccgcctgaagttcgatagttactttttgagggttctgcttaaagcacatattattgaatacgagccagtttccatcccgtactccggaaataaactgcatagggcgttttgctaccggacgtactaatttcattccttcacgatcatcatactgagaaaagtctatctcggtaaatgcatcgtagtgatttcccctgcgattactttctaattcaaaataatcaaaatcggcatagccgccagtagcacctttattcaagttataacaacataaagcatgacggatacccagaaatccccagaagttagaaactccttccggacctaaacggttatattcaagattatccagactataataaaacagtaaagatccttgctttgtcacttcagtgcgcaggtatatcttatcagttttgacaggaagactatcgacaacagtctctccttctcttcctccctgcctcatttcaagccaaaagccatccgctttcttccgtactcccagttggtacatgactctccccattatgccatttccggcaaaatccccttcacggagtccggtcaaatctaatgaaacagttccggtactataaggcccagacactttctgtgtcagagaattacgcgcccattcaaatccctttgcatactgcgcataaatcctaaaataaccgggacgatccgtcaggctccatttatctttccggggtacatgattgaattcccacacatgagccagtttcgaagaactgaaatcatccgaatgttggggaaatgtaatctcttgcttggccttgactgccggttttctataagttaccactccttttcccggtttaccttccgggcctaccaccggccaatcctcttcccatttcatcggatacagcatcacacacctacccatataatccctgtcctggaaagtataggcccacgactcgccttcaagtgtctccacatatccgccctgatgtacaccggcatcggcatagttgatatcatcatcaataaggacctttgtttcatacggaccgtaaagattacgggagcggctaatcatctgcaccccattgtatcccaatgccggattaaatatataataccaaccattccttttataagtgtgacatccttcaaaaagatattcatatcccttgggagctgttataatcagggtaccctcatcgttaggatccagtacaccggttccatcatctttcaaacgtgtcaggtatattttcgtctttccatgtgtgacatatttcttaccgtcatcatcaatgaaaaatcccggatcatacaaacgcttgtcaaacttatgcattgaatacggcccttccggtttattactcttaaacattacaaaaccatcatcggcaatattaactcctatataataggtgccatcatgatatttaatggaaggagcccaacacaaacgactatacgcggtctgctcattctccatcctatattgaggacggaaagtgatgctgtcgtaggcatgccctatgatacgccaatttataaggtctttagagtgacagataggaatacccggcatagcgacgaatgaggaactgaccatataaaagtcttcacctacccgtataatgtcagggtcgggataatcggcattaatcaccggattggtataagtaccgtctccattgtcagacgacaaagaagctgtagtttgtacgggaacagtgcacgactgtaccatgagtatgcaacaaagcattaacaacgcggaaaagccatccgctatttttcctgtagtaatagataagttatacatcttacataaatatataaagtgaggatgcaaatatatgcggtacagggccatcaagaggggataaaccggtaatatacgtgcactttttaggcacacggatatataaaaaaactcccgattaaaagttctgactcttaaccgggagctttttattttcaatagataggtttattatatctttattcttcgtacatcttatctatcacttccttgtaattctttgcaactataggacgcttcaacttcaaagtattagtcagttcgccacgttccatactgaaaggttcgggcaaaagtgtgaaacgtttcacttgctcatagtgggcaaactgttgctgcaaggtatctatgcgagcacggaacagaccgagaatcttaggatgttgcagcagttcttccatattcttatattcaatgcctttttccttggcataatctttcacaaaaccatagaccggtacaataagggcagacacaaatttacgctggtcggcaataatggcaatctgatcgatataacgatcaatagccagtttcgtttctaaagcttgtggactgacatacttaccattggaagtcttgaacaagtccttgatacgctcagtcagataaagttggtcacccttcagatagccggcatcaccggtatggaaccaaccatctttatcaatagcagcggcagtagcctccgccttcttataatagcctttcgtgatagtctttccacgcagaagtatttcattctcgtcaccgatcttcacttctacatcaggcatcacggtgcctacggaaccaatttcataaccctggttaaggaaacaagaaacagtagcagtcgattcggtcagaccatagccaaccaacatattgatacctaccgaatgaacaaattcacagatttcatcaggtacggcagctccagcagtagggaaaaagttaccgttctcaataccaatcgtctttttcagtaaagcataaaccgtcttttcgtagaatttatatttcagttgattcatcaatggcggagttttacctttacgcagataatcgatgttgtgtatcttacccaccttgatggcatccagcatcatagctttcttcaaccccgtttcctgagcaatcttctcttgcacaccggcatatactttttcccagaagcggggaacactgcacatcaatgtcggacggatttctttaatagtagtctggatatctaccggacggaggttgatgcaaatctgcacacctttatggatacaaagatatgtccatgctttctcgaagacatgtgtcaaaggaaggaagttcatggacacatcttggtcactcatatctaccagacggatatcatggatacggaaggcctctatatagttagaatgatgcaacatcacccccttcggttcaccagttgtaccggatgtataaagaatattggcaaggtcatcatccgatgcacgggaagtacgttcttccactatatcgttgttcggcaaaccttttcctgtttccaggaattcgtcaaaataaatagaagtcatgtcacgagggtcgcgtactacagcacggtcgaaaatgatcaattgctgtaatgattggcaaaagccaaatacactgaaagctgcatcatactggaattgctcgcctacaaagatataacgtatctgagcatcattgataatgtactgcgcttgtgccggtgaactggtagcatacagaggtatggtcaccgcacgattagcaaatgccccgaaatctacataaagacattccggtttattctgagaaaagattcctatgttttcttcctcctgcactcctaactctacgagtgcattcgcaacttgtcgaactgtctgtgagaattgattccaagtaatgggtatccactgcgacgtttcgtaatccctgtatttcagagccaccttgtcgccatacttctctgcccgtcgatgtacgaggacagataaatgatgataagtcatattattcatatattggtaaatacggcacaaaggtagtggtttcatttgaaactatttctatattgagaattaaatatttagtatatatttccgcaatactagtactatcctactataaaaagaagtgattaccctacatttttgttcgtttttccaaagaaatacaaatatatgtatatatttgcatccgatagtttttaaatatcaatacaataacttaacagacatgaaaaagattctagcattagtcgccatattggcgataggtttagggagtatcaacgcacaagataacctcagatggggtgtcacggcaggtatgaatgtaagtagcctcaacgtaaccggattggacagtcgcgtaggtttccatgcaggcgttaaggctgaattgggactacctcagtttacggaaggtctttatatggatttcggagcactgctttcgctaaaaggcgccaaagttgaagcaggcagtatggctagtttcaagatcaacccgtactatttggaaattccggtacatattggctataaatatgctgtaaatgataatttctctttgtttgccaatgcaggtccttacattgcaatcggtctgttcggcaaagcaaaaattactgccgacggcagtttggtagatggaggttccaaggtttccgaatcagagaacgtgtttggcgatgacggattcaaacgttttgaccttggattgggactgaaagcaggtatagaaatcagtaagaagtatcagttctccatcggctacgacttcggattcattgaagctgaggaattgatgggctgcaagaatagaaacctaatgatttctttaggacttatgttttaacgatatcaagaataaaaaaaggcgttgaataacgcctttttcaacatactcaatccttatatttacaattacataaaccaaattaaagacttaattacatgaaaaagattttagtaatattcgcattattagcggtaagtttcgcaagtgtaaatgcacaagagaacctcaaatggggagcaactctcggtatgaactccagtaatttttccggtgatgcattcagtagtaaagtaggattccatgccggagtcaaggctgaagtgggattgccacaaattgccgaaggagtatatttggatttaggtgccctattgtcactaaaaggtgcaaaagttaatcttggttcctacgatatcaagtataatccttgctatttagaaattcccgtacacatgggttataaatatgcagtgaatgaaaatttcgctgttttcggcaatgcaggtccttatgtcgctatcggtctctttggcaaagttaaaacagatggaatcgaatcatcagacccttctgataatgtttttgatgaagatggtggtggcatgaaacgttttgatctcggcctcgggctgaagttcggtgtagaattctgcaaaaagattcaggttgctttcggatatgactggggattaatagataacgccgatcacatagataacaagaaccgtaacatgatgatttccttgagctatatgttctaaaaatattaaatgctcttccccccttccgcactctgcccctctctatatttatctgcagcaacagtggaaggggatttttatcctatcgattaagcatatttcagtatttatccgtaagtttgcatcacaataatttaactgattgagatatggcttacgatataccgacaatggtttctgaggcaaccggagttcttaaatctctgattgctatcccttctcttagccgcgatgaagaaaaagcggctgattatctacagaattatatagagttgcaaggcatggcaaccggacgaaaaggcaataacgtatggtgtcttagtccgatgttcgacttaaataagcctaccttgttactgaattcacatattgatacagtgaaagctgtgaacggctggcggaaagatccgtttaccccaaccctggaaagtaatggaaaactatacggattgggtagcaatgatgccggtgcaagcgttgtcagtctgttgcaagtctttttgcaactttgccgcaccacacagaagtataatctcatctatctcgcttcctgcgaagaagaagtttccggaaaaggaggcatcgaatgtgtattgcctgaacttcctccgatacattttgctattgtaggcgaacctaccgagatgcaacctgccactgcggaaaaaggattaatggtactggacgtgaccgcttacggaaaagccggacatgccgcacgcaatgaaggagacaatgccatatataaagtattggaagatatcgcctggttccgcgaccatcattttgaaaaagtatctccattattaggtcctgtaaagatgagtgtaacgcagatcaatgcaggcacgcaacacaatgtaatcccagaccgttgtacgtttgtggtagatattcgcagtaacgaatgttatagtaatcaggaactgtttgccgaaatacaaaaacatatttcttgcgaagctaaagcacgttcgttccgcttaagttcttctcatgtagaagaaagacacccaatagtacagcgtgccgtggcaatggggcgtgttccttttggttctcctaccctctccgaccaggcactgatgtcattcccctctctcaaaatgggaccgggaaaaagtagtcgttcccatacagcagatgagtttattttcattcaggaaatagaagaagcgataggattgtatattgagttgctggacggagcaaccttatgaatgaaataaaaagcttactccaagtcgtagaaaataaatcagcttcaacgatatcccgttagtaacttaattatcaacgcattgcataccgactatttactcaacaatgtaaaagcatttaccaccgtatgtaatgacctttaccacttattgtaaagctctttacctcctattgtaacgactcttacctcggcgtgtaaataaagttaccatgtgggataaaaagaattaccttgtagagtaatggaagttatgctacaaggtacactgaatcatgaaaggaaacaactattccatgttatattaacctatttggttcttcttctgtttagctgaagaaaaaccaaatagattatcaatacggttattaaataagtcatcaatactatggcttacatacgactaaagtcaaacaattcagattctgtacgcgcaccttgcatcaatgtttctattttctttaccatctccggatattgctctgcaacgttattatcctcatgtatatctttggataagtcataaagttcaaatgttgttttctccagacaaccaacaaacagtcgcacgcctttccaattgccataacgtagagcttgtctacctcctttttcatgaaactcccaataaagatattcgtgttccttctgcttaccttttcctaacaaagtcggcaagaacgaaatgccgtcagtttgaatatcacgtgtagtgcctgttaactcggcaaaggttggcatcatatcccagaaagccataatatggtcattcgtaactccaccctcaatatgattcgggcaacggataatcatcggcatacgaatgcccccctcatagagatcacgcttcactccgcgataaggtccgtaacttttaaaataatcagggtttgccccgccttctctatgaggtccattatcagaagtaaatacgacaatagtgttatcatcaattcccaattcagctaacagttccattatctcacccacatatttgtccaaacgagttaccattgaagcaaatgcagccaaaggacgttctgccgcaccataagctccccggcggttcgggttttgctctgcccaagcctcatcatcttttgccgggatgagattacaataagattgatataccgaatctttcggcaaaaccaattctgcatggggaagagtatatgataaataggcaaagaatttttctcccgcatggctgcgaatatactgtaaagcccgattatggattaaatccgctgaatacgtaccctcagcctgattgtaattttcgggaaattctacacgttttgtaccgtcccacagatgatcgggataataatcatgagccaatgtttgacaattataccccaagaactcatcgaagcccactttagtcggatctgattcggaacccggatatcccaaaccccactttccaaaacacccggttgcataaccagcctcatggaacagttctgcaatagtatatgtaccggcaggcattgctacttgtccttcaggatccatacgcatgttgccgcgaatatatgtatgtcccgtatgttgccctgtcatcagtgatgcacgcgaaggcgccgaaacggaagtaccggaatagcactgcgtaaaccgcataccttcatcagacatccgttgcaaattaggagtctttattaaattctgcccatacggtgaaatatcacctataccaaggtcgtctgccaaaatataaatgacattggggctttgtttccattccgcttccggctgctgcgcacaactacaagcaaccatagctcctgcgattccacaagagatgctaaataatttttgtttttccatctgaaatcaatttagtattaaatttatcaatctatcgttattgcctttttagctttcggagtaaataatacatcgtcgatgcaaaactttcctccctttatcttaatattccggttacgactaccggacacccgaactttttgctctccgtttctggcataaactaaatctttgacctcaatgtcttttgagttattgaatgaaagtaccggcccttctgcaacatccaaatgtatattttccatccgtaatccacatgtctcatcaacctgcgctccggcaacagaatgtatcatacagtcagtaagagatacattacttacattcatttccggaaggccattgaaaaacattgccctaccagcatcacggcatgtgatgtttgaaatatgtatgtcttgaaaacacggagtgtcatcagttaccggcatgaagggaacatcagtcatttcacctccttccggaataccatccggttcaggagttttctcttgatagtaagagtcaaaccaaatagcatagttcgctatatcattcatcatgatattgtctacgtatacattagacacaactccaccacgacctcgtttgcttttgaatcgaagtccagtatcagtatcaatgaaacggcagttcctcacagagactctatcaataccacctcccgtatcacttccgatgacaaatccgccatgcccatgaaacacggtacaattatctataataatgttggcacaaggtcctcttctacgtcccacatcaccaattccacttttcagacagatggcgtcatctcccgcgtctaccgcacaattcactatcagtgcatttgtacatgaactcaaatcaatgccatcaccattctgagcattccaaggacaacgaaccataattccatcaaccacaatattatcgcttaaaataaaatttacatgaaaactcggagaattctggaacacgacaccttgcaacagtactctctcgcaacggacaaagcgtaccatacgtggacgtttcttggctaacttctcagatgatgtttcaggataccatattgctccatcctgttgtacagtcccacctgtttttataaaactattccattctgcattgctaaccttaaaacgcttgaccggacgccagaattctccgttaccatcaaatacaccttcaccagtaattgaaaaattactttcatgataagcactgataggagattggcaacggcttccagaagtgccctcatccggtgataataaaggatattgcgttttatcaggtgtaaataaaacaattgcatttttcaaaacatgcaagtcgatattacttttcaaaacgataggaccagtaagccatatcccctccggaacaattaaatgccctccgccacgttctgacaagtctgctatagccgccgcaaatgcctgagtattcaatgtcatgccattaccgacaccaccatactcagccagagaaacttctagttcaggaatagcaggagtaaccgcttttggaatatcaaaaggcaaaccttgatagtatttaccgtatccttccgctttacagggaaaaacaacaaacaatattacgaacacaagcataataagtttaactagctttctcatattacgtattcttttaaaatttgatgttacaaaagtaagcaatctataaaatggagatttgtaaaaatcatcagttatcattcactttttatcaaatactatttatttcatcttctttattcttgaatttatgcagttgaatatattccttgggcgacaccttatattgttccttgaaacaacgactaaaataacccggatctgagaatcccaactgataggcaacttctgatatggagaactgtccggttctaataagcaattcggcttttatcacacgatactctttgataagctctataggagatttgccggtcaaagattttattttattatacatagtagttcttcccaacttgagatgaacagccagatcattgaccgtcaattccgtatcatgtatattagtatctatccattccataagttccttcatgaactcttgatcacgattggtcaccaccacatcctcctgtgatacaaactcttcaatgcgatgattggcagattgagatgagaaatgttcaaaaagcaatctgcgccgtgtaaggagattgtctatgcaaaccagcaaaaattccacactaaatggtttggtaatatagctatctgccccatactttatagctttaaatttatcttccgaagtttgttttgccgtaagcataataataggaacatgactggtctcaaagttatggcgaagcttatccaccaattcgattccatccatccgtggcatgattaaatctgtcacgataacgtccggttgatggacagcgattttgtccaatgcatccaccccatccacagcttcaatcactctataactctccatcaagttattaaagataaatttacgtatctctgcattatcgtcaacaagcaaaattgttggcgcatcctttggaagagcctgttctgaataagtcgctgatatatttttcatgtcagtcgacaccgaataattattttcatccgctacagtgtcaaaatcaatctgctccatactgaaatgttgattaccccgcaagagttttattgtgaaggtactgcctttccccaccgtactttccacattaatggtaccatgatgtaattccacaatctcccggcacaaagctaagcctattccacttccatgtatatctctccttatcgctttccgaaattgtgagaaacgggcaaatatctgtttctggtgttctttggagattcccactccggaatcatctacagatatataaacacagtccttttcatcttctgcctccttacatgttatagacagagaaaccctcccattatccggagtaaatttaaaagcattggaaagtaaattgtataacacactctccattcgctccgtatcaatccataacataatacaactatgagaaactgtcaataagagagtgatttttcgttcatcagccatatccctgaagtctttaagtacattctgagctatgggtataatatcagcattctgcactttaagttccaatttgtctttaactattttacggaagtcgagtaattggtttattaaagataacatccgtttggaattcttgtatgacattcctaaactgtcttgtcctctttttgacaatgtttcccgtttttgcaaatcctccaatcctccaataataagggtcaaaggagtgcgcaattcatgtgaaatattagtaaagaatcttatcttcatttccgacatgtgttgttccatccttgtttctgcacgaagctttgtcattatataaagtgtgcgcattacaagccataatacagctaaaaacagaatactatatatacaataagcataccagctgagccatggaggagtagcaatgtgaatcttcatcgtaatctccggactgttcatcaactcattgccaacaaaagctttgacatgaaaagtataatgtccatgaggtacttttgaataataggcactgtttacttttcgcgaaatagtccaagtattatcatacccttccaaataatacatataatttactttgtcttgcaatcggaaattaagtgatgcaaactctacccgaaagagtaaataattatatggtaattctatctcattctttgccatatctgtctcccaaaaagaatttgcgatcttctgatcctgtatttccagatccgtgaatgacagacgatattcatattgagagaattgcactttatgagtatttatcatctgtagtttatttagccctccaaaaaggatagtgcctttagcgtcagtggcaacggatgcttcattataagatatcggagtagagttgctccatagagaataatcagtgaatattttctgctgaggttcaaaacgcatgattcctttctcggtcgaaatccaaatattcttgtccatatcttcagctgccgccaacacgatattgtcaagcaagccatcaactgtcgtataattcacaaatatgggtacctcattgtcagaatatccttttattaaacttaatcctcctccataagttgatagccatatctgcccggaggaatctttcaatatatgtatgacatcatttcctccaatagaattcttactgcctggatagcgcctacatacagtaaattgcatttcttcaggcgattctgaaggattacatatcatcagtccctcagtcgtagctataaacattctatctgatgtatcactgagtatatatctgactcgcttgccttcccccctaggataattggggaaattattataaatatttataaagcgatcagagtcgatatcagacaacagatttattcctccttcaaaagtcgcaatccatattctgccaaaacaatcctggtcaatagcataaacatgattatcagaaagtgacccaatatccccttctacatgaagataatgattaaatttatattccttcccgtcaggggtaagacgccacaacccatttcctttagtcccaacccaaatatttcgaagtgaatcctcaaaaatagcatatatcttgcctaatggatttccattatcagaatgagaatagagatgttttaaattgtattgactatcataacaatataatctaccattctttgttccgacccatagattactatctctatccaattggagagcgcgtatattatctggataatttgtgtcctgtccacttgaaagttggaaaatatccgaccgggcatcttctataacaattttcactaatcctttttcataatatggcgaaagccacatgacattatcatcatctatttcgaaagcggtaactccatttgtcattctgaaatcggttgaaggtacattaaagaaaggttctaccaagtctttctcccggttataatagccaaaacctgcttgtttcatttttatccatacaacatcattacattcttgtactacgctcaatgtatcggaaaaataatcaacagtattcaactcttgactgaagtgtttataatcacatcttgagggatcaaagcgtgtaatacccgggcacaaatcggttatccacacagtattgtgagaatcaactgtcatgtggcatatatgctgtggcacaatacctgacgacattttatcttccaaagcattcatctttttcttcagcactttaaccccactgaaggaagtaccgatatatagttcacttccatctgctgcactagccagagtcgttatgccatctattttgatatcatcatagcaaagtagagagtagcctttcaaaaaccgagaaatcaagtgatattttgtagcgaaagcaattccttcacctacaacggctgctgcaataatcggttcatcacttttaatacgcatctcaatctgaaaatcgggtgttatagttatcacacgcctccccctatcgcaaaccagccaaacagcaccatcaactgtttcacacataaaagaaacagcggaatctatctgtctatttccaataaaactatgagccgtcagaggggagctgtttttggaaccagagaaacataccacgccattatcttgaaactcaacccatacagtccctgttttatggcaaaataagacttttcctatacgataagatttcccagcaagttgatctacaagttgatctatactctcgaattgttctgtaaaacgattaaagcgatagaggtgcccatcgtaagtctgaaaccataaatgcccgttcgcatcctccatgacctgagtgaaacgattatgctgtaccggaagattatccggatcattgcaataatttttaaaatggtaaccgtcaaaacggcttatcccattccaagtacatatccagacaaaacctcttgaatcggtataaatatctaaaatgttattatgcacgagtccatctaacgatgtgtacgttgaaaaagtacctcgtaaagattgtgctgatatcgtcattggagatatccaaatgcagaaaaacaatatatgtagaaatttcctcataaataaagggtttattggaacaaatataaaactattcttctccccacacagccttcagcttatatttttcaatttcttccgatgtgagttgccgactccatactactcttttgccagttccagccccaggtcccttattattatattcggcataaaatgcagttccgctctgtacgatagctttcttccaatctgaccaaccttccggacatatatgagtacccaaaaaacaatttaaaaagacagtttgagcatggattctccaagggcgacccagaaaaacatgatctacattcttcgctgcaatcaaggaacagctatcaaaaataaatccatattgttgtcctttacaagtcgatgcagctgttatataagagttctttttactcaaaatagtgcattctttaaaataagctgtcgcacttccgaaaatgaagtccgtggttccttcaatcagacagtttacaaacaaatagcacttgtttcgactatataattcatcttctttcaaatttccgataccatataggaacaacgtatcatgattgccttttatatggcaatttatgtaacgttgcctatcacccatacaaagtaatgctaccgcttgccctacagcagattccgacgaattctcaatcgtaatgttttctgcaacaaaagaatcagcagcattaatgatagttgccgttcccggagtgccaatgcgcactccggtttttcctggtaatctggcaaaatcatgccaagtgatgaccgtttgccctcccggcctaccaataatcctgagatttttctttgacgaaggtatattaactttctcttgatatattccttcctctaaaaatacaactgtttcacggtcgcaaaaatcaggaacagccactattgcctcacttaaagttttaaaattaccacttccatcagcagatacgacaaaatctgcctgataaagtgaatcgcctgcattcgctgtaatatccgttaccgataaaataacgagaaaaaaatatataaatattttcatcttagcttatttatatacaacgctcccttccgccttatttgaaacaaaagcgtttctctccgatatacaagaagaagaaactgaaatcaaccgattgcgactgcccgttactatcaaagcgttcccatctatccggcgacattgaaaacctataacagttaaatctttcacattattgagcatcaatgccggaccactttttggagtaaccatcacattacgcaggtttacattggtagcttcgtgtatctttgcaccttcgtcagcgtatatgtgacaatcttctataaatacattccggacattcatctccggcagtccgttgaaaagcattgcccgttttgctccgtgacaggttacctgcgatatatatatatccttgaattgtggcgtagtctcatctgcatcaaaagcaatcatgtcctcgtcttgttccggtaatttcacgctcacccgtttcccatagaacaagtcaaatagtaaagcttccgaaacgatatcattcatcatgatatttttaatgtaaatgttctctacaacacctccacgtccacgtttactcttgaatctcaggcctacatccgtacccgaaaagcgacaattggatacggcaatgttctttactcccccactcatctcgctgcccacaacaaagcctccatgtccatgatagcaaacgcagttgtccacaataatattagaagccggtataccacgacgacgtccctcttcatctttgccacttttaatacagatagcatcatcacctacatcaaaccaactgtcggtaagaagcaaattggtacatgactcaatatctattccatcaccattcttggcataccacggacaacgcacagcgatattgtgaacaataatatcacggctaagagagaggtgtacattccaacaaggagaattttggaacacaattccttccagcaaaactccgtcacattctctgaaattcaccattacaggtcgtaaaaagtcacgaacgctttcaaaatcctccattgtcttagcccagggaacaatgttttgaatggcatctttggcaccgcgatagtaactttccgtaggataccacaactcaccatcctcactaagtattcctccattttgtatacattcattccataccataggtggcatttcattcttctttccaagacgccaaatatcacctgcaccatctatgattcccttgccagtaacagctacattgctctttctcacagccgaaagctgaggcttgcaacggaacgtcttacacccctcaaacacggtttcgacaatgggatagagagacttgtcttggctgaaaaccactatcgaattgtctgacagatgtaattccacattgttttccaattcaattggtccggtcagccacaccccttggggcacaatcaaacgtccccctccctttgaagcaagatattgaatggctttctcaaaagcttcactattgagtgtcactccatcaccagaaccgccaaaatctgttaagcagatatttaaatcagggattacaggccgctcaataacaggcatttcaaacggtaaatcacgataaatgtctttcatatcctttgcttgcaatttcatacttgaaaaggacataattataaatagaaaaattaataactgatttttcattctatatcgattaaaagttaatcccaaccttcattttgataccccttcagcgctaaattcaattctattgcagccaaaggtatagggcgcagataaaatttggtggtaatcctccccacaggaatatccggattgtgcgcttccacatattctgctaatttccccgttctagtcaggtctgtccaacgatggtactccccagccaattcgcgggcacgttcattcaaaatataatcaatgttcatctcagatgcgaccgcaggtgttgctttagcacgattacgtacaatattaatataagagaccgcttcttccggtttattcaacttaatataagcttccgcagctatcagatttgtctctgctaaacgagctaaatagatgtcacgcatagaagaagtaatcttaaaatactgttttccattctctatatcatcaaacttacgaaatggagctactccacagatatctgcagacattttagcttgataagaggtttgttcattgctaatattatttccttccggaagcatttccactataattgcatttttacgactgtcaagagccgagcgccaacttgctatgtttgcaatctcccaagaaggacaataataataaatcacttcactcgtatttttctttttctcatcataatagtcccaataactttgacgcaactcaagcataaaagttccttcatatcgttcatcttgagccggattatccgtatttgtattaaatacttcatgcatccataatgtgggagttaatgtagaggaggtatatttatgaccagcttctgcaccttttaaataaggtccgtaatcagcttgttgtctgtttccatctttctgtacatcagctacagttgctacattgtaatcaataaaaaatagaatctcctcattcctttccccttggttactgaacaaagttgtaaatggcgtggtcaaaggagcacctgctcctgcacttttagctgatgtaacggctgcattaaaatctttctcatcatgagtgaggtatcctttgcataaataagcttttgccaaataatgtttagcagcgacttttgtaaaacgaccgtcgcttgatttctcagcaagcacagatgaagaagaagccaactctgtcaattcatcaataataaattggaaaatagattccgcactctctcgctgtacacttgcaataggagaagtagtacgtgtggtcactaaaggaactccaccgaactgctgtactaaattcaaataataaaatgcacgtaaaccacgtgcttcagcaacgcgctcggcacggctatcatcttcacctccccaataaatcacttcattcactaaagaaatagccttgtagtgttccttataaaatgttgtcacattttcttcggcacttgaatagttctgaccatacaagttacaaacttgcacagaagtacgtccacttgcaaaaagatcagttcctccctcaaacagccaaggagcatcactatatatagttcttaatgaaccataagcagcattacacaaactttcaaacccagctgatgtgttatagtaatcagctcccggtacattcgatttattatcctgttccaagaaatcagaacatccagctaatattgcaaataaaaagactgtcacaactgtatataactttttcataatcatatttctactattaaaatttaacatttaatcctaattgataagtaacagaactcggtcctcctgttccatctgaaattttagcatcagcccattccggatcaaatcctttataatctgtgaaagtgaaaggattcaatatattagcgtaaatacgcaaattctcaagacctattttctttatcagttttttagaaaaagtatatccaactgttatatttttaattttccaataagaagcatccacataattattagattcaaattctttattcttactagtataccaaccatttccaccgccataattataagctgccccatcaaacggatacggataagagcctacggttgtatggtcagccactatattaggattggatgtaagtgaggtcgttgtttttccatcccacgtataattgaatattggagcaccctctggaatataaaaatccatattcaatttagttcgtccacggtcactataatttgtaaattcttccataaaaggactatataacaaatgcccttgcttcgtatttatactcatagaaaaatcccaattcttatatgacaaagtgatagacaagtttccagtccatttcggtaaagcatgccccaatatctgccgatcatcatcattcagtttcccatctttatttgcgtcttcataagtcatacatccttcaaaatagccataccattcagaattggtctttgtcaccccattaatcgttactaactcattcgcttttgcttgagtacatattcccaattgtttcaaatcataagcaacatcaatgggttgcccgataaaccaacgctcggcacgcatgtcttctttcttaccttgtagttcaagaatttcatttttattcttagcgaatgaagccgttatatcccaataaaaatcctttgattgaaataatattcctttcaacatcaattccactccgctattacgcactttacctacattcgcagtcatacttccattataggaaccttgttctaataataatttcatatccataagcagatctttggatgtttttgtataccaatcaaatgtaccagaaactcgtcctcccaagaaagcaaaatccagacctgtattaaattccgtggtagtttcccaacttaataattcattcataataccaggaccaaatcctttaccgaagccagaataataaagctgattggcaagaaatgaagtttcataatttcctacagaagcattatttcccgtagcaccatagctaacacgtaatttcagattattaatccacgacatactgtttttaacaaaattctcttcactaatacgccacgctaatgccgctgaaggaaacattccccagcgatgaccttctttgaattttgaagaaccatcccaacgagtagacaaagtagccagatatttccctttataaccataatttacacgtaaagcatatgaaagcattgtcgatttcccataagaactcttcacatcgctatagcccgaagcagccgaacccaaattataccacaaagtttcagaagtaacattatttcctgttaactcatatttttcagcttctgtgctataaacactcatcaaagccatagcattcaaagtatgactttcaccgaatgtcttaatgtaattcacttgtgtatcccatgtataagaaaaatattcatctttagttatagtcgctttagcatcaccggtaggattgtctttagcattgtaagtccctgcttgttcttcagaaagcccactatagtattctcctcttcgtttagtagacattgttggagagaatgttgttttaaccaatatttcttctatcggctgatattgcaaatacatcgttgtcaatacgcgatatcctttagttttatcctcggaattcattgcatcaactaaaggcgaaactgtagaagtaaaccctgccggatacgcctcacttttctcttgtccagctaccaaatctttacctggcatataattcagttctccagttgcagtattgtaaggaagccaaaagccattagagcgaaaagatgtctgtactgctcttctcgaaccataattatactcaaaagcgaccagattagctgttgcccccatggccaattgcctatttatcttaccatcaattgctaatttcagattatagcgtctcagtccatcacccattaccccatcctcttgttgataaccagtacctacacgataggaaacttttttcccagcacctgacacttggatgaaatgattctgctgtgtaccatctttaagcattagatcagtccagtctgtaaaatcatgattcaaaaactgctcttgcattttaggagcatttttattccaacaagctttcatatttgttgttgttatttcaagaggtaaccgtccattaataatcgctgcattctcaacaggtgtagcatatctcatataacggtagttaatccattcaatcgggtccataaagtcaggcatccgcgcaacagttttatatccagcatagccatcatatgtgacagacactttcatgtcttctcctgctttggcttgcttagtagtaacaatgacaacaccattggtagcacgcgaaccataaatagctgtggaagaggcgtctttcaatatgtctattttttcaatatctgaaggattgagaaaattaatatcatcacaaataataccatctactacaaataaaggttgggtactacttcctaatgtacttttaccgcgaatggaaatattgaaactctcacctacacggctggatgattggctaatatccacccctgcaacttgcccctgtaaagactccataactgtagtagttcctttggatgtcagtttagtattatccacactaccaatagcacctgttaaatctgatttcttctgtacaccatagccaactaccacaacctcttccagagcctgggcatcttctttcaaagtaactttgatataggattgttccccaactgtaacaacttgagtaatatacccaataaaagaaatctgcatttttgcatttaaaggtacatcttgcaaagtgaaattaccttcaaggtctgtaataaccccatttgttgtaccgacaattaaaatatttgcaccaattattggttctccggcattgtcaagaaccgttccctttagttgatggctctgcgcaaaagcaattgagcagattgtacttaataataaaagtacaaataccctttgagtagtctttctaaaatccataatgctgtttttaatagttattaaatttagatgaaacgttttattttgggtgcaagaatagcgaataacaaccatttatacttggattttttttcatttttataggagaatttatccaaatacaatcataaagaacaaacagccatatatcaacgacaagtattgcagcaagcacaccttcacagtatagacgtgcaacatttgctgggaaagaatggactagctaccctcttgcagaaggaagaatacaagatggagcctgtgaagtgaagcaacaatctttcaaaaggaaattcacaatcatcgattcagccacggttccggattcagtttctccttttctttgcgcaactggaagtgaagcaccgtacgtccattgtccgcaccatccgaaaatacttgtccgagggcttgccgggtagtaacagtatctcccgtcttcactgaagcagaagccaggttacaataaacggaaatatagtttccatggcggataagaatattgaaaagtccgttcagttggaaaacagcagctacctttccgtcgaagatagcacgcgcctgtgcaccgggcttaccttgaatgtctatccctttattatccagtttcacattgcgaagcccctctacggaatactgaccgtagcggctggtgatgatatacggtccggtaataggtattggcaatttaccacggttgttgacaaagctaccggacaattcccggtctgccttatccatcgtatagatttcgagaggtgccgctttcttggcgatggctgcttcggaagaagaagttgcagccggtttcgtttcttttgcagtagcctttttgcgggcagccgcttctttacgcgcctcttccgcagcacgtttacgagctttctcaatttcttcggctatcaagcgatcaatacgcgcattcagctggtcggcttccctacgcttcttgttcaactcattttgcagcccacgctgcttcttctgtaaattggcaaccaaggttttcttctccttctcctggttttccaacttttctttttccacttcacgctctttcagcaaactggctttggctttctttacctgttgaagttccgtcttcttttgattgacctgctcttgtttcttcagaatctcttcgccttgcaggcgctgatagtcggcatactcacgcacatagcgcaaacggcgataagtttgcgataatgtcttggcggaaagaataaacaaaagtttgtcttggacggaacggttcttatacaaatattgaacagaagactcatatttcttcttcttatccttcagatcattttcgaggcggactaactgacgttccagtttggaaagttcacgatctatagtctccatatcattattaatggcgaggatataccgttttcgttcctcaatctgcccggtaagggcggcaagaccattcaactggctaccgacatctttctttgtagtgttcagaagtgtttccgactcggctatctgcttttgcaaagcgccccgtttgctttccaactccttaatcatcttgttggattgggcgcaaagtggcagagccagacagaaacaacttatgaaaatacaaagaaactgtctcataacttagccagcatctctaaaagttcagtccattcaaccttagtatatctggaagacacctgagtcggagtcagcgatatctctttgtccgaaaagtcggtaagaacgatttttcctttttccaaagaaggaatccccaactccttgcctgtcaaagaagctttgccaccgggtttggcagcctcaaaaagcatcttctccaaatgggcaaagtcggccttcttgggcaaaacgtctttcaattccttacgagtagcctgtacataacgttttcccatgcggtccactaccaacacatcgtcgggagtaatctccaatcgtgccacttcactgcggaggataggcatcagaagggaaagctgcatacgttcaccgcttacaagcttcatggtaccgttcactgtaattgtgcctcccttgttaggaatggtcaactgtactttagaagataaaaagcgcggttctcccaacgaagaagtcactttccgggaagtcttacaaccggaaagacctactaccagggtcaggagaagcatgagaggcagcatacgaatactgcctaccgttctgtatttgctgtgtaacgttctcattcgggtatatatttctttttctcgatcttctttttcaatgtcttggactcactgcccacttcctgagcctgcttccaatacttcaaagcaccatccacatcaccggtcatataatagatatcacccccatgttcaagaatggtatcactttggtctttatcattctttattgcatcgtctatgtagaggcgggcttcggcatagttgcctttctcaaacagaatccaggcgtaggtatccagataagtggggttcttcggttcggatttcaccgttttataactcatttcctccgctttgtccagatcacgacgttccagcgagagataataggcataattattcaatgctcccagatttgccgaattgtaaaccaatgcagagtcataggccgcataggcttccgtattcattttctttgtgtgatagaaatcgcccatgatggcataaaagttagaaacgaattctttatcactcttttccgggatgttttccaatcctttcttgcaaatggcaagtgcatcatctgtgcggtcagcctgattataggctatggaaagatagaaatagaactccagcatatcgggattagactcgataccggcctcgcaaagacggattacttctttataatcttctttccgtattgcttcaccgagaagtgtcatacgagcagccgtattcgtcggatcaatgtccagcactcgttccagtacaggcatggtctctttattcattttcttggcaagaagatattgggcataaagcatcggcatctgtgcatcatcctgatcttgttccataatacggtcaaaaagattgatcacgcgggtactgtctctacctgcccgttcattttcaaccacaaactgacgcatcacgttcaactttgtatcagaaggcactttcttattcagtaaaagggtatccagttgttgctcgtagagttctttctgtccggtttgttcgtaataagaggccaatgaatacatcgccatggcattatccggttcggtagcaagcactttcttgtatatgttataggcttcgtccttcttgtcgttctgcatataaacatcacccagtatcacctgatatcgcatatccatcggatactcttccaccagactctctatctcacggaaagcgctctgattatccttcttctgtaaatagatacgaaatttctccatactgagttgctcgttctttcccatcttttcttccaaacgattcaaggtggtaatcacattatcgtactcttccagacggttatatatatccaacaagctgtacagaggatccatcctatccgagaaacgggttgccatgctttccagcagattcgtggctttctgcatctcattctgttgctgatataagctggccaatccctggctataccaataattatccggatcattttccacagccttttccaatgctgcctgtccttgcggaacttgcttaaggtacatatagtactgcgaaatctcgtacaaagccgatgaagcattcggattaatggtcagacaatgctgcaataagtcaaaggcagcactataatcgtctttcatcttcaagcgggaagcttccaggaagaagtaatcgtatttacgctgttgctcgggcgtaagcacaacctgcgccttggttcctttccgctgtttttttcctccctgacgggaagtaccacacgatataagtatcgcgcacaatacgaaaagagatactattttaaatttcattttcattcagtcagttagtagaactcagccccttttagtttttaaattctttgatttttaactcctcaactctttcctgtatgaccgaagccgcctgcaccacgctccgtatcatccagcacttccacttcctgccatgtagcttgttcgtggcgtgctattaccatctgcgcaatgcgttctccgtcttctatcacaaaagtctccgatgaaagatttacaaggataatacaaacctctccacgataatcggcatcaatcgttcccggagaattcagcaccgtgatacctttcttgatagcaagaccactgcgagggcgcacttgtgcctcaaaccccggtggcagggcaatatataatcctgtaggcaccaagcaacgctgcattggagctaaagaaataggttctgaaagattagcacggatatccattcctgcggacaattcggtggcataagccggaagcggatgtttcgatttattaatgatttgtacgttcatgacattaattacaaattacgaattataaattacgaactgccgctatttcagtatttaatagcagttcttcttttttaattgggcgaaaatacagcttttaaagcaaaatagtgatacatttgcagttaaataataacaaagggcaaatgtcccctcttttttgccatttataatttgtaattcataattcgtaattatcgccatgaattggaacaccctcatatctgccaaacgcttcgggcttgaagagtttcaccaggagcgtcacgaaaaccgttcggaatttcagcgggattatgaccgtctcgtcttctccgcccccttccgccgcttgcagaacaaaacacaagtttttcccttgccgggtagtatcttcgtacacaaccgcctgacgcatagtctggaagtttcctgcgtaggccgttcgttgggaaatgatgtcgctaaagccattcttacccgtcagcctgaattgaaagattcgtatttacccgaaattgggtctatcgtatcggcagcctgcctggcacacgacttggggaatcctcccttcggtcactccggagaacgagccatctccactttcttctccgaaggaaaaggtatgcctctaaaaggacaactgtccgcagagcagtgggaggacctgatacacttcgaaggaaatgccaatgctttcaggttgcttacccatcagtttgaaggaagacgcaaaggaggattcgtattaacctattccaccctggccagcatcgtaaaataccccttttcatcgagtttagctggtaagaaatcaaagttcggcttcttcaccacggaggaagatagtttccaccggatagccgaagaactgggtatgaaaaagctgaatgagactccactgaaatatgcccgtcatccgttggtttacctggtagaggcggcagatgacatttgctatcagatgatggatattgaagatgcccacaagctaaagatacttaccacacaggaaacacaagatttacttctttcctattttcctgaagaacgtaaaacgcatatgctcaaaacgctgaagcttgtcagcgatatcaatgagcagattgcctatctgcgttcctgcgtcataggactgctcatccaagaatgtacccaggcttttctgaataatgaggaaaaaatattaaagggggaatttgaaggaagcctcatcaagcatatttccgaattgccagccggtgcttataagcacagtgcagatatttcgttaaagaaaatctatcgctcgcgtgatgtactggacatcgaacttgccggtttccgcatcatcagtactttgctcgatctgatgatcgatgccgtctgctcaccggaaaaagcttattcacagttgctcatcaaccgggtatccggccaatacaatataaaagcgcccgtactctacgaaagaatacaggcggtattggattatatctccggcatgacagacgtttatgcacttgatctctatagaaagatcaacggaaacagtttgccggcagtataagttgtgcttcaggcacaattatcatctacttggaaagaacactttattagccccggaggtaagtttgcaagcctccggctcattctcgatgaatgactggatatgacggatacgcttttctgccagaatctcatccacagcaatcagaattcccgtttcttccacatcgccgaaaccatagttaatggcagtaccgaacatacgcatcgtcggactcaaactcatataagcatttaccaacggcggaatattgtagcctaacttacgtatctcgcaattcagtatcttatagtcctccttaaatgtcttcttacaaaacaaagcagccaaatcagcctctttagcttccatttcaagcggtttcatcggagtaatcagattatctttatcctcaaagtgcttcttcaagaaataaagaatcatgtcgcgtccctggcgatgatagctcggatacatagtcactttaccgaaaaaatacttcacattcggcataactaccgttaacgcacccaaaccatcccataggttatccagcgcaaacaagcctttgctaccggcacgggtggactgatactctaccgtaacaaatgaacgtcctaactcaattgtagtgggaaggtactctttcaggaacttttcagagaaattgaacatgtgggctgtagccaggataggggcaccctgttcatcgaaccgaacgtccgtaccaaggatataacgataaccacctaatatttcttctgcttcagggttccagacaatcagctgtttgtagggattatccatgatatcgtattcatcgatatccagcggttgtcctgtacctccacctgctgcacggaaagcgatctcgcgtaaacgcccgatttccttcataatattcggagaatcctgagctgtaatgatataaatctgattatggctcttattcgtcatacgcagacgcttctcttcggtcagttccgctttcagaagttccttactaataggttcaataatctcttccatatttttttgttagtagttctcttattaaaactaagttctataatttataaacgatatcttttacgtaagccgcccactcggcaggagtttttgatttatcaaaagtctgccaggaaataggtttcccgatggtaacagtaaacgttttatgacggttcttcaacatctcgtcggcaaggtagagcatggctatgttaattttgatgcccaaaaatttgcagacgttagccaaattataaaaaaagttcgaattccggccttcaaaatgaatggggacaacgtcgcgttgtgcctgcacactctttacgataaaggtcttcttccaatccagatcacggatcactccattctgacgccgggagcacaatccggcagggaacataatcaactgatcattcgatgcaaagcccgcttccaccattctcggaaaatcttttgcctgttttcctgtcttattaataggtatacaaagaggagctaatccttgcagattcatcagcaggtcattcaccatatacttcaccttacctttatagaaactacccaacacatatcccaaagccacaccatcctggcctcccaacggatgattagagacaaaggtatacaatccttcagtcggtagattctcttctcccttcactacaatattggcatccagaaattccagacaggcttttaagaagtctacacctaccttatccttcgattcgcgcaggaaaacattcagttcttcctgatgaacgattcttttcagataagagaccacgaatttggggatatacttatagtacttcggagccttttcccggagcactttatcaatatcaatcaaaaataaagagtcgtcagccattctttttaagatgaaatgattgcgcaaaattaactcatctttttaattatacgcaataaaattggtgaaaactgcacccaaaaacaaacaaaaggcacccaaaaactatcaattgatagtttttgccctaaagattgctcaaaatgcgtccgtcagagttagggaactttcgtaaaattgcaacatcaaaagtcaaacaaacgaataattataataaaaaaggagaacgatatgaacagtattacatttcaaaaggatttgctcggagtacaagacgatttattacgttttgcatataaactaacctccgaccgtgaagaagctaacgacttactccaggaaacctctctaaaggcattagataatgaagataaatacatgcccgacactaacttcaaaggatggatgtacaccatcatgcgcaatatctttataaacaactatcggaagctggttcgcgaccagaccttcgtagatcagactgataatctttatcacctcaatctgcctcaggagtccggattccaaagcaccgaaagcgcctatgacttgaaagaaatgcaccgtgttgtaaatgcactgccacgcgaatataagattccattttctatgcatgtatccggtttcaaataccgcgaaattgcagaaaagctgggattacccttaggaacagtaaagagccgtatattctttacacgccagaagttgcaacaggaactgaaagacttcagataatctgtgttgcaggataaaaacagttattaccctatacaacctaaaccgataacgttcagatataaaaaagtgttcatgaagaggtcagagactacttgcatgagcactttccgaccacccgaaaactatcaaaacaccacctaaaaactatcaattgatagttttccccccaaatattgcctgaaatccgtctatcagaataagataactttcgtaaaattgcaaagtcaaaaggcaaaacaataactattgaaaaggagaaatgattatgaataacagtattacattccagaaagaattgatcggggtacaagacgatttattacgcttcgcatacaaattaacctcagaccacgaagaagcaaatgacctactccaggaaacctctctaaaggcgttagataacgaagataaatatgcacctgatactaatttcaaaggatggatgtataccatcatgcgcaatatctttatcaacaactaccgcaaggtggttcgcgaccagactttcgtagatcagacagaaaatctctatcatctcaacttaccgcaggaatccggctttgaatgcacggaaagcgcatacgacttgaaagagatgcatcgcatagtaaatgcattgccccgtgaatataaaattccattctccatgcacgtatccggtttcaaataccgcgaaattgcagagaagctgggattaccactcggaacagtgaaaagccgtatcttcttcacccgacagaagttacaacaagaactgaaggattttgtttaggagaaaagaaaaaaatctgcaaaaccgatatatagtataaatttttagttgtgttagagagaatatgggcagaccggaacaatatccagcctgccctttctttatatcccctcgctccatacccgaaccgtatccgaaccgtacttgctccgtacattcttcggccagaagtacctctgtacggagcaagtacggctcgggtacggtacaaatacagtccgaatacaaaactaacaaggtttttacacctcaatttcccacgaataaagcctttcggcactatgttcattatcaacgaaataaacaatgaacagggtgttgaaaacttctcagaaagtttttagttaaatcttgtggggaattgtggggaaatgtgtacttttaccgtcgcttattataataaggtaacaatgatacgttttttgggcaatatagaagcgaagaccgacgctaagggacgtgtatttatccccgccggttttcggaggcaactgcaatccgcttccgaagaaaggctcgtgctgcgcaaagacgtattccaagattgcctggtactctatccagaaagcgtttggttcaagacgcaaaaccaattaaggaggcgattgaacaaatggaacgcaaaacaccaagacattttccggcaatttgtgagcgatgcggaaatcatgattcccgatgggaacggacgcatccttctgcccaaacgttacctgcaaatggccggcatacagagcgatgtacgttttattggtgtagataatacaatagagatctgggcaaaagagaaaaccgaacagccattcgtaagtccggaagagttcagcgaagctttgcaggacattctgggagatgaggatgattgggaggaagaagaagatgagtaacaagtgattagttattagtgatgaatgaagaattgacatatcatgtaccggtgttgttgaagccgagtgtggacggaatgaatatccgcccggatgggacgtatgtagacgtcactttcggtggaggaggacattcacgcgaaatactgtcacgattgggagacggcggacggttactgggatttgaccaagacgaagatgccgaacagaatatcgtggataatccgcattttatttttgtacgcagcaatttccgctacctgcataacttcctacgctaccataatatagaagaagtagatgcgatacttgccgatctgggtgtgtcctcacatcacttcgatgatagcgagcggggattctcattccgctttgatggtgcactggatatgcgtatgaacaaacgtgcaggagacactgcggcggacattatcaatacttatgatgaagagcgcctggcagatatcttttatctgtacggagaactgaaaaacagccgcaaattggcatccgtactcgtaaaggcacgcgccggacaaaagattacaactatcggtgagtttctggaagtcatcaagccacttttcggtcgggaacgcgagaaaaaagagttggcaaaagttttccaggcattgcgtatcgaagtaaatcaggaaatggaagcgctgaaagagatgttgtatgcagcaaccgaagcgcttaaaccgggcggacgcctagtagtaatcacgtatcactcgttggaagacagaatagtgaagaatatgatgaaaaccgggaacgtggaaggcaagatggaaaaggatttctttggaaatgtacagacgcctttccgactggtaaacaataaggtgattgtaccggacgaagcggagatagaacgaaacccgagatcgagaagtgcaaaactgagaatagcggagaaaaaagaggaggaatagtggttagtgttaagtgattagttattagcaataggctatgagtgaagtagaagagaaacagattaatgagaaaacagagaaagcgaaaaaagctaaaaatcgcacgtctctgaagaacatcattggtggtgatattctggcaacggatttcttccgtcgtcagaccaaattgcttgtgctgataatggtactgatactgttttacatacacaaccgttatgcttgtcagcaacaaatgatagagattgataaactgaaaaaagaactgattgacattaaatatgatgccctcacccgtagctcggagttgatggaaaaaagtcgccaatcacgcattgaggaatacattgcaaccaaggagagtgacttacagacctcaaccaatccaccgtatttgattaagtaatcagtagaatcgttaaacagaaaacagacttggcagtaaataagaaaaatatcatgacccgctacttctttgtagtcctcgtaatggggctgctgggaatagctattgtcgtaaaagccgcaattatcatgtttgcagagcgacaatactggcaggatgtagccgaccgtttcataaaagagaacgtgacggtaaagcctaatcgtggtaatattctttcatccgatggcaaactgatggcaagttccttgccggaatatcgcatctatatggactttaaggcaggtggtgtaaccaaagataccatgctggtgaaccacatgaacgaaatttgcgaaggactgcataagatattccccgataaaagtgccgccgaatttaagtcacacttgcaaaaagggcgtaagaagggtagccgtaattatctgatttatccgaaacgtatctcgtatatccagtataaagaagctaaacgtctgcctgtattcaatctgaacaagtataaaggcggtttccacgagcaggtttataatcaacgtaagaagccattcggatcattggcagcccgcacattaggcgatctttatgccgatactgcacaaggtgcaaaaaatggtatcgagttgtcattcgacaccttattaaaaggtcacgatggcatcactcatcgccagaaggtgatgaacaagtacctgaatattgtagatatagcccccgtagatggttgtgatattatctcaaccctcgatgtaggcatgcaggatatctgcgagaaagcattggtagacaagttgaaagaaattaatgccactgtaggtgtggcagtactcatggaagtacagaccggtgaagtgaaagccatcgtcaacatgatgaaagccaacgatggcaactattacgaaatgcgcaacaatgccatcagtgacatgatggaaccgggctcgactttcaagacagcttctatcatggtggcccttgaagatggaaagatcacaccggaaacagaagtagacaccgggaatggtattatgatgatgtatggcagcaaaatgagagatcataactggcatcgcggaggatatggaaaaatcaatgtaacacgcattctggaagtctcatccaatgtaggtgtctcctatctcattgataaacattacaaagataatccgcagaaatatgtggatggtttaaagcgcatgagcatcgaccaaccgctacatctacaaatttccggtgaagggaagcccaacatcaaggggccgaaggaaagatacttcgcaaaaaccaccctgccctggatgagtatcggatacgaaacacaggttccgccactcaatatcctgactttctataatgccattgccaacaatggtgtaatgatacgacccaaattcgtaaaggctgcggtaaaagacggtgaagttatagaagaatatcctacggaagtgattaacccgaagatatgctctgaccggacattgactcagatacgtgatattctggaaaaagtggtatcacaaggattagccaaaccggccggaagcaaacaattttccgtagccggcaagacgggtacagcacaggtatcacaaggaacagcaggctataaaaacggacgagtaaattatctggtaagcttttgtggctatttcccggctgatgctcccaagtatagctgtatcgtttccatacagaaaccgggacttccggcatcaggcggtctgatggcaggtagtgtattcggaaaaattgcagaaagagtatatgcaaagaatctgaggtttgatatccgcagtgcaatagatagtacaagcaatgtcattccaccagtaaaagccggagaaatgaatgaagcctttcaggtactgaatagtttgaaagtaccggtacagaaacaattcacgtccaagaaaggacaagaggtttggggacatacacaagctgctcccaatgcagttgttctgcaaggtaaagacggggccaacccggatctcgtccccagtgttattggaatgggagcgaaggatgctgtgtacctattggagagtaaaggtttgaaagttagactaaacggtattggaaaagtgagaaatcaatcgataccgggaggcaaccgtgtggtaaaaggacagacggtgacgttagcacttcattagaggtgcggacgaaagatttattaatttagaatatatattatatataaggtatggtattaagtgaattactgaaagcaatacaaccgatacagattatcggaagtacggagacggagataacgggggtaaacatcgactcccgcttggtacaagccggacatctgtttatggctatgcgcggtacccaaactgacggacatgtctatatccccgcagccatagagaaaggtgctgtcgccgtgctctgcgaagatgtacccgaagctaaacaggagggcatcacctacattcaggtgaaagacagcgaagacgctgtaggcaaagtagccactacattctacgacgatcctacttccaagatggaactggtaggcgtaaccggaacgaatgggaaaacgaccatcgccaccttattatataatacattccgttatttcggttataaggtaggactgatttctactgtttgcaactacatagacgatcagcccatacccactgagcatacgacccccgaccccatcactctgaaccagttattaggacagatggcagactccgggtgcaagtatgtcttcatggaagtgagttcgcactctatcgaccagaaacgtatcagcgggctccgttttgcaggtggtattttcaccaacctgacgcgcgaccatctggactatcacaagacagtggagaattatctcaaagctaagaagaaattcttcgacgacatgccgaagaacgccttcagtctgaccaacctggatgataagaacgggcttgtaatgacgcaaaacacgcgttcaaaggtatatacctactcattgcgcagcctcagcgatttcaaaggcaagatattggagtctcatttcgaaggtatgttactcgacttcaataaccacgaactggccgtgcatttcatcggtcgttttaatgcttcaaacctgttggcggtatttggtgcagctgtactgctcggcaaaaaagaggaagatgtattggttgccctcagcactttgcagccggtagccgggcgctttgatgcagtacgttctcccaaaggcatcaccgccattgtagattatgcacacactccggatgccctcatcaacgtattgaacgccattcacggagtacttgaaggtaaaggcaaggtgatcaccgtagtaggtgcaggcggtaaccgcgataaaggcaaacgccccatcatggccaaggaagcagccaaagccagcgatcgcgtcatcatcacctcggacaacccgcgttttgaagagccccaggatatcatcaacgatatgcttgccggattagacaaggaggacatgcagaaaaccatcagcatagccgaccgtcgcgaggccatcaagaccgcttgcctactggcacagccgggtgatgtaattctcgttgccggaaaaggccatgaaaactatcaggagattaagggagtgaaacatcatttcgatgataaagaagagctaaataaagtttttaacggttagtgataaatgattagcaactgcattatcaccatgcaagacactaatcacttatcaccaatcactaatcactaagaacatgttgtattatttatttcaatggttagacaagtatgacattcccggtgcgggtatgtttggatatacatcattccgggctttgatggcaatcatccttgcattgctcatttcaagcatctggggagatcgttttatcaacctgctgaaacggaaacagattacggaaacacaacgtgatgccagcatcgatccgttcggggtgaacaaggtaggtgtaccgagcatggggggcgtcattatcattgtagcaattctcattccgtgtctgctactgggtaagttgagtaatatctatatgatattgatgctgattaccacggtatggctggggtcattaggatttgccgatgattatatcaagattttcaagaaagacaaagaaggcctgcacggaaagttcaagattatcggacaggtaggtttgggattaatcgtaggacttactttatacctgagtccgcaagccgtcatccgcgaaaacattgaagtgcagaaacccgggcaggaagtggaagttattcatgcgggacaagacattaagtcgacgcagactaccatccccttcttcaaaagcaataacctggattatgctgatttcgtaagtttcatgggtaaacatgcgcaaacggcaggttgggtactgtttgtgattatcactatattcgtagtgacagccgtcagcaatggcgccaatctgaatgatggaatggacggtatggcggcagggaactcggctattataggtttggcactgggaattttagcttatgtatccagccacatcgaatatgccggttatctgaatatcatgtatattcccggatcggaagaactggtaatcttcatctgcgccttcattggtgccttgattggttttctgtggtacaatgcgtatccggcacaggtattcatgggtgatacgggtagtttaaccattggcggtatcatcgccgtatttgccatcatcatacacaaagagttgctgatacccattctttgcggtgtattcctgctggaaaacctatccgtcattttacaacggttctattacaaagccggaaaacggaaaggagtaaaacaaaggctgttcaaacgaacacctatccacgaccacttccgtacctccatgagcctgatagaaccgggctgtacagtgaagtttacaacgccgaccaagttgttccatgagtcaaaaatcacggtccgtttctggattgtgacgattgtactggccgcgataacgattattacattaaagataagataacagagttgccagtgacgagctacaagctacaagtgctcgctaccggtaaccaataagaaacaaacttgtagcaactaccaactccagccactgcttgtagctcgtagctggtagcccgtaactaaagaaaacatgagtagaattgtagtattaggagccggagagagtggtgcaggtgctgccgtactcgccaaagtgaagggattcgacacattcgtatccgacatgtccgccattaaaagcaaatataaagaaatgctggacaggtacgacatctcctgggaagaaggacagcatacagaagagctgattttaaatgccgaagaagtggtgaaaagccccggcatccccaatgatgctccgattatattgaaactgaaaaagcaaggtacgcctgtcatctctgagatagagtttgcagggcgctataccaatgcaaaaatgatatgtattaccggttcaaacggtaagaccactaccacctcactcatttatcacattttcaagagtgcaggtctgaatgtaggattggcaggcaacattggcaagagccttgctttgcaggtggccacggatcaacatgattactacgtgattgagctcagttctttccagttggataacatgtataagttccgcgccaacattgccgtgctgatgaatattacgcccgaccacctggaccgctacaaccactgcatgcagaactatgtggacgcaaagttccgtatcacgcagaaccagacaccggaagatgccttcatcttctggaatgacgaccccatcatcaaacgcgaactggacaaacacgggttatgcgcccacctttatccattctccgcaatgaaagaagatggagccatagcctacgtagaagacggtgaagtggaaatcaacgaacccatcgccttcaacatggagcaggagaaattggctttacaaggcacacacaacttatacaattctctcgccgcaggcatctctgccaatcttgccggaatagagaaagaatatattcgccgtgctttgtccgacttcaaaggcgtagaacaccgccttgaaaaagtagccactgtgcgcggtgtagagtttatcaacgactctaaagctaccaacgtaaattcctgctggtatgctttgcagagcatgaaaacgaaaacggtcctgatactaggcggaaaagataaaggcaacgactatacagaaattgaagacctggtgcgcgaaaaatgctctgccctggtttacctgggattgcataacgaaaagttgcacgatttcttcgatcgcatgggattgcccgttgccgatgtgcaaaccggtatgaaagatgccgtagatgccgctttccgtttagcgaaaaaaggcgaaacggtattgctgagtccttgttgtgcaagcttcgacctcttcaacagttatgaagatcgcggagaccagttcaaggaatatgtaagagcattatgaccgcgcccgggataaaaagacggtcgcacatcgtgagaaaagcaagcgtatatgagcgctttcattccttaattattaactattaatttgcgaagcattggacttactcagaagcatattcaaaggtgacaaggtaatctggatcatattccttttcctttgcctcatttctatcgtagaagtgttcagcgccgcgtctacactgacgtacaagagcggtgaccactgggggcctattacacagcacagcatcatcctaatggtgggcgctgtagtagtggtgtttatgcacaatattccttataagtggtttcaggtgttccctgtgttcctgctgcctttgtccgtagtattactgggtcttgttatgatgatggaacgcatcaatggtgctgcacgctggatgaccttcatgggtatccagttccagccttcggcggtggcaaaaatggccgtgatcatcgtcactgcctttatcctctccaagggacaggatgaagacggggccagtccgaaagccttcaagcgtatcatgattatcacaggtgttgtctgcctgctgattgcaccggagaacctttcgacggcggctttgcttttcggagtggtttttctgatgatgttcatcggacgggtggcaatgaagaaactgttgatactggccggtgctctggcaggagtagcaatcataggtgtagcattcctggtactgaccaagaatagcgatttaccgttcctgcaccgttttgacacatggcgtgcccgtatagagaaattcacggatgacacagaagtgcctgccgccaaattcgatattgacaaagatgcccagatagcccacgcccgtatcgctgtagccacaagcaacgttgtaggtagaggaccgggtaactcagtacagcgcgacttcctgagccaggcattctctgactttatctttgccattattgtggaagaattgggattgataggcggggctttcgtcgtattcctctacgtctgcctgctgatacgagtcgggcgtatagcgaagaagtgcgaccgaacgtttccggccttcctcatcataggaattgcgctgttgcttgtatcgcaagccgtatttaacatgatggtagcagtaggattggcaccggtcaccgggcaaccgctgccgcttatcagtaaaggtggtacctccacacttatcaactgcgcctatatcggcatgatattgagtgtgagtcgctatactgccaaattggaagagattaaagaacatgacgcacagatacctatgcaagtggaagctgctgttgaagaaggaaatagcgagatacaaacagcggccgaaccaacagcaaaggtgctgaacagtgatgcagaattcgagtaggagacaacggagtgacaactcctttaactcctgcaataaaattaagtatgaaagatatgaataaaagtcataacggagaggctccccgcattatcataagcggtggcggtacagggggacatatattccccgcagtatccattgccaatgccatcaaggaactacgccccgatgcagaaatcctctttgtaggtgcagaaggacggatggaaatgcaacgtgtgcccgatgcaggatacaaaatcatcggtctacccgtggcaggcttcgaccgtaaacgtttatggaaaaactttgcagtgattataaagttactccgcagccagttgaaggcacgccgcatactgaaagagtttcatcctcaggtagcggtaggtgtaggtggttatgccagtggccctacgttaaaagtagcaggtatgatgggagtgcctactttgatacaggaacagaactcttatgcaggcgtaacaaacaagctgctggcacaaaaggcctgcaagatttgtgtagcgtatgatggaatggaaaagttctttcctgcggataagattattatgacaggaaatccggttcgacagaatctgttagcaaataagcagagtcgcgaagctgccgtgacctctttcggtttcaatccggagaagaaaacaatattgatactgggtggcagtcttggagcgcgtactataaaccagactctgattgccgcactggatgcaatcaaagcatacggtgacattcagttcatctggcagaccggaaagatatacattcagcaagtgaaagatgccatcactaccaccaccggagaagcggtacgtaatccacgcatttcagctatcccgaacctctatgtgacggacttcattaaagatatggcaagcgcgtatgcggctgccgatctggtcatttcgcgtgcaggagcaggatctatctctgagttctgcctgctgaataaaccggttattctggtaccctcacccaatgtggcagaagatcaccagactaaaaatgcactggccctcgtagataaggaagccgccatttacgtgaaggatgcagatgcaatgaagcatcttattccggtagcactcgaaacggttgccgatgcacaaaaactaaaaacgttgagcgagaacattgccaagttggcactgccggactcagcaactataattgcaaaagaagtattgaaactgatagacaaactatagtatctcaatgaataaacagcagtatcccaattcccctcctcctgggaggaggggtgcctgaaaggcggggtggtaggtgaaaaacatattccttattttaaagagcccctgccatttcacctaccacctccccccgttggggtactcctcctgggaggaggagaattgagatagtattaaaatataagaaaatgaatatagaaaacatcaaatccgtatatttcgtcggtgccggcggcatcggtatgagtgccctgatacgttatttcttatcaaagggcaaacttgtagctggttacgaccgcactccgagcgaactgaccgaacaccttatcgcagaaggtgcacagatacattatgaagaaaatgtaagcctgatccccgaagattgcaaggacaaggaaacaactttagtcgtatacaccccggccgttccgcaagatcatgccgagttagtgtacttccgcaataacggtttcgaaatacaaaaacgcgcccaggttctgggaacaatcacccacagcagcaaaggtctgtgcgtagccggaacgcatggtaaaaccactaccagcacaatggtcgcacatttgctttatcagtcacatgtaggctgcaccgcattcctcggaggcatctccaagaattatggaactaacctactactgtctcagtccagtccgtacacagtgatcgaagcagatgagttcgaccgttctttccattggttatcaccgtacatgagtgtcattacagctactgaccccgatcatctggatatctacggtacggaagaagcctatctggaaagcttccgtcattatacaaccctgattcaaccgggcggcgcattgatcattcacaaagacattgctttgaagcctgatgtacaatccggcgtaaaagtttatacctatgctcgcaccgaaggtgatttccatgctgaaaatatccgcatcgggaacggtgagatatttatcgacttcgtggcacctgatacacgtatcaatgatatccaattaggtgttcccgtcagcatcaatatagagaatggtgtggcagccatggcgctcgcccacctcaacggtgctacggatgaggaaattaaacgcggcatggcaagtttccgcggagtagaccgccgtttcgacttcaaaatcaagaatgacaaagtggtatttctgagcgactacgcccatcatcctgccgaaatcgcacaaagcgtaaagtctatccgcgatctatatcaggacaagaaaataacagctatctttcagccgcatctttacacacgtacccgtgacttctacaaggaatttgccgacagcttgtccctgctcgatggagtgatcctcgtagatatctatccggcacgtgaacaaccgattcccggtgtcaccagccagctgatatatgacaacctgcgtccgggcattgaaaaatatatgtgcaggaaagaagacatactgaacctgctatcgcagaaaaagatcgaggttctgattactttaggtgcaggagacatagataactacgtccctgccattgcaaaacaattggcagagtagctgacagttgagaaatcataaatcataattgataaatcatacatgctgaaaagaattctattgtctatcgtcctgctgctcgtcatcgcctatctggtggtagctatcacggctttcaaccggaagcctgccggacaggtgtgtcgtgacatggaattggttatcaaagatacagtttatgccggcttcatcaccaagaaagaagtttcgggtatgctggaaaagaaaggtatttatcccgttggcaaacctatggatcgcattcgtagcaaaacattggaacgggaactcgccaaacatccgctgatcgacgaagtggagtgctataagactcccagtggaatactctgtgtggaagtcagccagcgcatccccatcctgcgagtgatgagtgcaaacggtgaaaactactatctggacaacaaaggcaccgtgatgccacccgacgcaaaatgcgttgctcaccttgccatagtgaccggaagagtagaaaagtcgtttgccatgagggatttatataagtttggtgtatttttgcagaataataagttctgggacgcacagatcgaacagatacacgtgctgtcggacaagaatgtggaattagtgccccgtgtgggcgaccacatcatctatctcggtaagctggacggctttgagcgcaagctcgaacgggtgaaagctttctacgaaagaggtttaaatcaggtaggatggaacaaatattcccgtattaacgttgaatttagtaatcagattatctgtacgaaacgagagaattaaaatataaacaatagaaatatatctatggcaacaacagaatttatcgccgctatcgagttgagttcttccaagatttccggtatcgccggcaagaagaacagcgacggaagcatacaagtgctggcctacgcgcgtgaggatgcctcttcttttatccacaaaggagtcatctacaacattgataagaccgcacaggctctgacttccatcatcaacaagctggaaagccagttgaacaactccattgccaaagtatatgtaggcatcggcggacagtcattgcgcacggtaaagaatgcggtaagccgtgtgctggaagaggaagggattatttcgcaagagttggtagatgcaatcagcgatgaaaacctcgaagttcccctgatggacatgagcgtgctggatgtagccccgcaggaatataagatagacaacaatcttcaggccgatccggtgggtgtggcaggcaaacgtatcacaggaaacttcctgaatatcgtggcacgtgcttccctcaagaagaatctggaacacagcttcgagcaggccaaagtagaaattgccgacttgctcatcgccccgatagccctggccaatgccgtgctgacggaaagcgaaatgcgttcgggatgtgccttggtagacttcggggcagatacgactaccgtatcagtatataaaaataacattctccgcttccttagcgtactgccgctgggtggaaacaatatcacccgtgacattaccgccctgcaaatggaagaggccgaagccgagcaactgaagctgaaatacggagatatgctttacgaggaagaagagactgaaacaccagcagtctgcacactggaggacggtcgtagcatcgagttgaacgtgttgaacgacatcatcgacgcccgtgccgaagaaatccttgccaatgtatggaaccaactgcaactttccggatacgaagacagattgctgtccggcatcatcttcaccggtgggggcgccaacctgaaaaacatggaagacgcattccgcaaacgcagcaaggtcgataaggtaaagaccacccggtttgtacacaacaccatccatggcttcagcgatgtactgaagaaagacggcatgcagaatacactgctcggcctgcttgctgccggcaacgaaaactgctgcctgcaagaggtgaagcctgcacctgccgcttccaccgttactccaccgaaacccgtcgatatgtttggcgacgacgaagccctgaaagaacaggaagccgccgcccgtgccgccaaagcacagcgcgagaaggaagagaaagaacgtcgcgaacgggaacgcaaggagaaagaacgtaaagaaaaagaagagaaaaagaaaaagaagaaagaaggccccagctggtttgaaaagactttcaacaagatttccaatgagattttctcggatgacgatctgaaatgatctcataacgtataaatcataaattataaatcataaatcccattatcatggacgatatagtacaattcgatttcccgacagattcaccgaagatcattaaagtgattggtgtaggtggtggtggtggtaatgccgtgaaccacatgtaccgggaaggcatacacgacgtaacgttcgttctgtgtaacacggacaaccaagcgttgaaagagtctcccgtccccgtaaaactgcaactggggcgttctattaccgagggactgggtgccggaaaccgtcccgaacgtgcccgagaagccgccgaagagagtagcgaagaaatcaaatcgctgctgaacgacggtaccaaaatggtatttatcaccgccggaatgggtggcggaacaggtacgggagctgctcccgtcattgcccgcatagccaaggagatggacatcctcaccgtcggtatcgtcaccataccttttatcttcgaaggtgaaaagaaaattatccaggcgctggatggcgtggaacgtatcgcccagcatgtagatgccctactggttatcaacaacgagcgtctgcgcgaaatatattccgaccttacgtttatgaatgctttcggcaaggcagatgatacgttgtccatcgccgccaagagtattgcagaaatcatcaccatgcgtggaacggtgaacctggactttgcagatgtaaagaccatcctcaaagacggtggcgttgccattatgagtaccggcttcggcgaaggtgaaagccgtgtgacgaaagccatcgacgatgccctgcactctccgttgctgaacaataacgatatcttcaatgccaagaaggtgatgctgaacgtatccttctgcgaaagttcggaactgatgatggaggaaatgaacgagatccacgaattcatgagcaagttccgcgaaggcgtagaggtaatctggggtgtggctatggacaacacactggaaggtaaagtaaagattaccgtactcgccaccggtttcggcatggaagatgtccccggtatggacagtgtgctcgaaaagcgcagccaggaagaggaagaacgccagcttcagctcgaagaagaaaaagaaaagaacaaagagcgtatccgcaaggcttatggcgaaagtgccagcggcatcggcagcaagaacattcgcaaacgccgacatatctatatcttcaaccccgaggatctggataatgctgatattatcagcatggtagaaagttcaccgacatacctgcgcgataagagcaccctgagcaccattaaaaccaaagcggctaccgaagggcagcttgctacggaagaggcacagggcggcgaagacttaggaggaataatcactttttaagttgagagtggagaattgagagttgagagttggctgcgctttcatgccatacagtaactctaaactttcaattctcaactctcaactctcaactctcaacttatataattatggatttatttgaaagagtcagcgaagacattaaaaccgcaatgaaggccaaagacaaagtggcactcgaaacattaagaaacatcaagaaagtattcctggaagcaaagaccgctccgggtgccaacgatactctgaccgacgacgctgcattaaagatcatgcagaagttgatgaaacaaggcaaagatgccgctgaaatatacatccagcaaggtcgtcaggacctggcagatgctgaactggcacaagtgaaggtgattgaagtttacttgccgaagcagatgtccgccgaagaactggaagctgccctgaaggaaatcattgccgaaacaggtgctaccagtggtaaagatatggggaaagtaatgggcgttgcttccaagaagcttgccggacttgccgaaggtcgtgccatctccgccaaagtgaaagaattgctgggataaactcccgccttatttctgttataagccgtgtttccggaagatagaagaaagtaatttaacttctatcgcccgaaaacacggcttcttttcgcattttattgagtatcataatttttatttcaaatactatcattatatttgccacgcattttcaagggaatatccccgcataataataaaactagaattctggcacagcatatgaaaagcaatataaagatgtggaaattaatggtccttgcggggacaatgcttttcttgtctgacatagcttacgccaaaagccggacacaagacagcgtaccgggatataaaccggatacgggatacttcgccaaacgttttattcacagactgggcgtagaataccgcccagggtatatattccctaccagctcattcctggcgggggacaattctcaatggaaacctttcgaatggggctattccgcccacctgaaatattcattccagttcaagcccaatacatgtgccgaccggatttacggcagcgcctaccaaggtataggtgtaggctactacgacctcggaagcaaagaagaactgggaaacccgattgccgtttacgtctatcaaggtgcacgcattgcgcgtatcacccaacggttgtcactcaattacgaatggaacttcggtgtgtccttcggctggaaaccttatgacgaacgctacaacccgcataacagtgtaatcggctcgaaagccaatgcctatatcaatgccggcgtgcaactgaactggatggtttcacggcagatcgacctgattgccggagtaaccggtacccacttctctaatggtaataccaaatttcccaatgcgggtctgaacaccatgggattgaaagtaggcgtcgtctataacttcaacagaccggaagatgcgcttaccaaacctacgtactatgcacctgtaccgaaatttccgcgccacgtcagttatgacctgaccctgttcggctcatggagacggaaaggcgtgtgggtaggtagcggacagatcgcttcaccggatgcttatacggtgcttggtttcaacttcgcccccatgtacaacatcggatataaattccgtaccggtgtttcgctggacggtgtatacgatgccagttccaatgtttatacaatccccggaaacggaaatgagtgctacaagccgtctcttcacaagcagttagccctgggtatttcaggacgtgcggagtacgtgatgccctacttcacagtcggtgtcggtatcggtgccaacgttctgcatggcggcggcgaccacaaaggtatctaccaggtcttgacgctcaaagtggaacttacccgcagctcctatctgcatgtgggttacaatctgaagaatttcagcgatccgaactatctgatgctgggtatcggcttccgtttcaataacaagtatccgactttccaccgctgatacaacgcatccggtccgggagttcttcctcatatccctcatacatctttatcacatccctatttaatctcatgcaaaagatggcatcttttacatcaaaaggtggcatgttatgctacaaaagatggcatcttttacagcgaaagatggcatcttttgcaccaaaggtcagtgagatatacaggaaagggtttattgttctacgtcaaaggacttattaatccatatcaaagagctccttcagcacctcaagagactttaatacaggaaagtcaggcaagtgaaggcgataatattcattcattattgtaaggcagcgggtacgttcagcacggttcatggcaaagaggtgcattgtttcataattcatgcgcatcagcatcgtcagccgtgaagcctccgcaggaagtatataaaatgaatgaagctgcgggcgcaaaggagtgaaacaggcattcagcagatcaaagtaatcaccattctcataatcctccagattagggtacaaccccaggaagcgggataagcgcatcaggaacaccagatggaaattagcaaaactatcgcgacactcgtccagccagataatagaatgttgcagataagcaaacaacggacggttctcagcctcttcgcgcaccgcacgatacaggaactccgccaggaaaagcgctatggaagatttgtacggatcgtagggaatggaagaaaatggatagtaagacttcgcctccgttatcttatacatactggcgttcgaacggaaatccgcctccagctccaccaaggcgagtggctgaaacagcaccgatttcaccgcagccttccgcgaacggggtatctttacaatgaacgaagcacgaccggccgtctccgtatagatgtccgcaataagagaggtatcgttatatttcagggtatgcagcacaatccccagcgttttctgtaacatccgcgcttcaagttttggtttcaatccggtaacaaaactacgaaaaaagccggaaataacgggaataaaacaaggataaataaaaaaatgcaggtagggaagtaaaaaaatgaaagatattattctcctgatattcagaccataaacacagaatcagagaataaacgctacaaatccctttatttttttcttgagattattttgccaattcaaaaatagtccctacatttgcaaccgcaaacgagagataatctctctgcaagagcagaaatgctcaccaaaggatggcccgttcgtctatcggttaggacgcaagattttcattcttgaaaggggggttcgattcccccacgggctacaattaaaaaaataaacgaattaaaaaagattagtcgagatggcaaatcacaaatcatcactgaaaagaatcagacaagaagagactagaagacttcacaacagatattatggcaaaaccatgagaaacgctgttagaaagcttcgttctacaaccgacaaagcagaagctgctgcgatgtacccgggcgtaactaagatattggacaaattggctaagaccaatgtaatccataagaacaaagctaacaacttgaagtcaaagttggctctctacattaataagctgggataagctaattaatattacacaaaagatatacaaggaaagtcggactttttagtccgactttttctgcatctgcacctatcgccctaccccgttccagacaccttccgcaagaagctaaaaagctgtaaacgaatgaaatttatcactcagtttagtttcgtatctcacgaattttcactatatttgctctgttatttgaataaggaaattagattatgactgaagaacagattaactccaataacgggagctattcagccgagaacatccaggttctggaaggtttggaagctgttagaaagcgtcccgcgatgtatattggtgacattagtacgaaaggacttcaccacctggtttatgaagttgtggataactctatcgacgaagcgctcgccggctattgcgaccacattgaagtaaccatcaacgaagataattccatcactgtacaggataacggacgtggtattccggttgattttcacgaaaaagagaagaagtcagccctggaagttgtcatgaccgtattgcatgccggcggtaagttcgataagggatcttacaaagtatccggaggtttgcacggtgtaggtgtatcttgtgtgaacgccctgtccacacacatgactacgcaggttttccgtaacggaaaaatctatcagcaggaatatgaatgcggacatccgctgtatccggtaaaggaaatcggaacaagcgatattacaggtacacgtcagcaattctggccggataacacgatcttcacggaaaccgtttacaactacgagatccttgctacccgtatgcgcgagttggcctatctgaatgcaggcatcaagatcactctgaccgaccttcgtgtaaaagatgaagaaaacaacgccaagatggaagttttctactcggaagaaggtttgaaggaattcgtccgctacatcgactcttcccgcgaacatctggtaaatgatgtaatctacatcaacacagagaaacaaggcacaccggtggaagtggctatcatgtacaatacgtcttataacgaaaatatccactcttacgtaaacaatatcaataccatcgaaggtggtacgcaccttgcgggtttccgccgcgcactgacccgtacgctgaagaaatatgccgaagacaacaagatgctggaaaaagctaaagtagaaatcgcaggcgatgacttccgtgaaggtctgacggctgtaatctctatcaaagtggcagaaccgcagtttgaaggccagaccaagacgaagctcggaaacagcgaagttatgggagccgtagaccaagctgtaggtgaagcactgaactattatctggaagagcatccgaaggaagccaagatggtggtagacaaagtgattctggccgcacaggcacgtgttgccgcacgtaaggcgcgtgaatccgtgcaacgtaagtcaccgatgtccggtggcggtatgccgggtaagttggccgactgttcaagcaaggatcctgaggaatgcgaattgttcctggtcgagggtgactcggcaggtggttctgccaagcaaggccgcgaccgtagattccaggctattctgccgcttcgcggtaaaattttgaatgtggaaaaggctatgtggcataaagcgttcgagagtgatgaagtcaacaatatcatccaagctctcggcatccgcttcggtgtggatggcgaagacagcaaggaagcaaatattgataagttgagatataagaaagtgattatcatgaccgatgccgacgtcgatggttctcacatcgacacgctgatcatgacgctcttcttccgctacttcccgcaggtaatccgcaacggatacctgtatatcgctactccgcccctctatctctgcaaaaaaggtaaagtggaggaatattgctggacagaccaacaacgccagaaatttatcgacacttatggtggtggttcagaaaatgccgtacatacacaacgctacaaaggtttgggtgaaatgaatccggaacagttgtggagtacaaccatgaaccctgaaaaccgtatgttgaaacagataagcattgaaaatgccgccgaagtggattatatcttttccatgctgatgggtgaagacgttggaccacgccgcgatttcattgagaagaatgcaacgtatgcaaatattgatgcgtaagaaaaacagtgattaatgatttacgattagtgattagtcactgaataacacgtttttattaaccaacctcacatcttacaacgaagaaacgccggatggacaggaaaatcctgttatccggcgtttttcttttcagctcacgaaatagaaaaagacactccgtgagatggttccgtactatctttacaacagattctgtttcttcatctcttctgccaccaattccagctcagcataccaatcctcaccgaacttacgtatcaacggttctttcagaaacctgtataccggcagattctctttccgccccagcaatacagcggctttacacacatcccaacggttataattcactgccttataaactccgtaatttcctaccctgatcggatacaaatgacaggaaacaggtttgtagaaatctgtctttccgtcccgatatgccttttcaatagcgcaataacaacaacctttctcatcataacaagtaaaaacacaatccttgttgttgacaatggaggtcaccagatcaccctcacaatcagtatacactaccccttgtttctctataacggcacgtgcctcaggagcaagttcttcccaaatcacaggcagtacttcttccagcttttctatttcatccagttccaccggagctccggcatctccctcaacacaacaagcacccttgcaggcatccagattgcatataaacttttcacgcagcacatcaaaactgaccactacgtcacctatttgtatcatttcctataaaaaattaattgcggatgcaaagataacactttgttccgcaattaataagcacagattacctatttatcgaatgtcaggattataagccccgctcttatccacgaaaccgctcacataagaaccgtcatctcctacgcgagcatagtaatatgccagcccattaaaagagaagaagcataccgtcaaaagaagaagtatttcaacaaaagtaggaaaaactacatttacgaaaaggactttatgggatatgttattataatcaactgtttaccatcttcctcgcacaactgatagctgccttgaaaggcttccagatacagacggtttatggcatgctgaatttcacgttctctttcgttttctgcatccataagtagcggactgtttgtaaccactatcctcaattcatctatacttttataatccaacatatactgcaccgcatacggctcacgcctcccttttggtgacatcagaacggaagaaagcagcttcatgaagcggacggtatccacctgaacaagctgcgtatgcaaatcagtaaggaaatcaacctgaacagaaattccttcctgcaactctgcctgcatcctggcatctgtgcacaactgcaccatgtcatactcctgcacattaaatttcatcatgcccgactccaggcgcgaaagatcgaggatgttgaatatcaaatcgatcagcttctcagcatttcgccggataaccgccgaatattcctgctgctcctccatgctcagatcatttctttggcaaagagaatcagaaagagttacaacagaatgaagaggaacactaatttcattcgtgatgttgtgaagaaagacttctttcatcttatcagccgcctgaaccacggcatacgattcacgcatttcacgctccgacttcgccagttcccgataaatccgggacactcgtaacactccccctacaagtaaaatgacaaacagagatgcaccgcctactgctatctgccagaaacgctttgcaccaatttccttttcaagcagggctttctgtatcctataattggcctgaacggtctcctcattcatacgcaacgtagccttattgatagaatcgcatttcagcacagcgactctatatgtttcagcagcttctttataccgtcccgcatcagcataagcatctcccataattctgcgtatatccatctcatacatcggctgagtgcctttaaaggcagacaatgttaattcaaattgcggaaaacatttatcccaatccttcgttatataataatagcccgcccacaaaaaattataagcaattacagtagaggaaaaagaatcatcagtgtagaactttgcagcttcgtccagatgcttcttcagattaggagcatcctcaacagctaaatagattttacaatacattaattctatttccaggattttactcctataagaatcaagcatcgcatgctgctcctttatgataccatcaatgattctccgttgagcctccaattctgctatcatttcaggatgtttattaaacaaataataagcacttgtcaaatattggtgaaccattagctcatcctccgtggaaagtgaagttaactccgctgcttttttataacattcaatcgctttttcatagttccgggcaaaaacatacgctttaccctctgtcacataagacagaaatataccccgactgtctttcagacgaatagcttcttcacacatcttttgtgattccagaatcgctgattccgtatcacctctgctccccttaagttgaagcatgtaatgtaatgcggaaaagtaattgtcatagatcttagagcgataacagacttccttcagcaaggctaatgctttatccatattctcaccatccagcctgaaagtgtaatagcggaaatattcgtaacgaagcgccaattcactttccacatctttcatgcttattgcagaggctaatgccgaatcaagcaattcagccgaccagtctttatcaatattatgtacaaagatatccttcagaaactgagtccgggcagtatcagcaggcatcgaccgataaatccggaagatactgtcacgcaaattactgccatccgaggcctgggtagcagcaagcgaaaacgagctgactgcacaaagtaacaaaagaatcagctttttcatcgcaccacctcctgctttagaggatgaataaacacaaaccgcgcaccggcagtatagccggaatccacccagatttctccacccagccgctttataatcaacttgcagatggacaaccccaagcctgcgccctgcactccctcattcagcttctcaaaccgaccgaagatcgtgctttgcctttcaagaggaataccgcaaccggtatccgccaccgagaactctgcaaaaccctgttcatccaatcgcaatgcaagcgtgatgcttccctctttcgtaaacttagtggcatttaccagcagattcaccagcatttgctgcaaacgcccttggtccgtctctatctccaacgaagtcaattccgtttcaaaacggatatccgctgatgtctgcttgatgttatccagcatcttcaccacattgcggcagagggtcaccatttcatgcatagtgatgctgaacttcatattcgctacatccaggcatgaaatatccacgacatcattaatcagtttaagcagcaattcggagttcaattgaatcacatcgttgcactgtacacgggtagcctcatcaattcccggcgtagtcaacacttccgagaaacccgccaatgcattcaggggagtcttgatttcatgactcatattggaaaggaacaagctcttgttacgaatggattcttcggccatggacttagctttctgaagttcatttttagaatgaagcaaccgcttccctacctttttcagatagaaaaaaccacccaataaaaaaacggcaagggataggatgatgataaaagagagttgtaacaaacgcttttgctgtgcactattttgcaattccagttcatcgatggtataatctttgcgcatatcttccacccgctctccggtgtatacacgaaacagagaatcaccaagcactatcatttcactataaattcgggccgcatctttgtactcttcttcttccattttctgttcggcattttgccaatacaagctatctactattacctcttctgcacaaagagatgacggcatcccggacaagacaaatatcaatagtaatataagtagtttcattccatcaattgcgtgtattgtctgcaaagataaccttttagagagaaggactgccattgaagcacaaaaaaagagatgttccaagagcataaaatctcttgaaacatctcctttattgaatattgcaggcagttgcttacttaatcaagtcttttcctgtcatatcagccggctgcgccatacccagaatgtgaaggatagaaggagcaacatctgccaaaacaccattctcaactttagcgttcttgttctcggttacataaacaaaaggaaccggattcagagagtgagcagtgttcggagtgccgtcttcgttcagtgcatggtctgcattaccgtggtcagcgatgatgattacttcataatcgttggctttggcagcttctaccgtatctttcacacattcgtcgatagcttttacagctttctcgatagcgctataaataccggtatgtcctaccatatcaccgttagcgtagttcacaacaatgaaatcgaacttctgagtgttgatagcttccaccaatttatcctttacttcgtaagcactcatctccggtttcaagtcgtaagtagctactttcggagacggaaccaggatacgctcttcagcgtcatacggagtttcacgaccaccgttgaagaagaaagttacgtgagcatacttttccgtttcagcaatgtgcaattgagtcttgccttgagctgccagatattctcccaatgtattctgaacattctccttatcgaaaagaacatgtacgcctttgaaagatgcatcatacggagtcatacagtagtattgcaagcccggaatgatgtgcataccctgttccggcatatcttgttgagtcagtactacggtcaactctttcgcacggtcgttacgatagttgaagaagataactacatcaccttccttaatggttccgtcgaagttaccatttacaatcggcttgataaattcgtccgtcacaccttcgtcataagattcctgcatagcctgaaccatatcggtagctactttaccttcgccgtttaccagcaagtcataagccactttcacacgttcccaacgtttgtcgcgatccattgcatagaaacgacctacgatagaagcaatcttacctgctgacttttcgcaatgtgcagtcagttcttcaataaagcccttaccactcttcgggtcggtatcgcgtccatccatgaagcagtgaacaaaagtattatccacaccatattctttggcaatatcgcaaagtttgaataagtggtcgaatgagctgtgtacgccaccgttggaagtcaatcccatgaagtgaacgttcttacctttttctttggcataagtgaaggcggaaacgattcccgggttctttagaatgctattgtcggcacatgcacggttaatctttaccagatcctggtatacgatacgtccggcgccaatattaaggtgtcctacttccgagttacccatctgaccatcgggcaaacctacattttcaccgcttgcctgaagctgtgagtgaggatatgttgccagcagactgtcccagtacggagtaggtgtattgaaaatcacgtcatctttcccctgatcgccgataccccagccatcaagaatcattaaaagggctttcttactcataatattaattgattttaaatgtacaatctttcaccttagcaaaaacgttctttatagaaagaacaatttttccggctgcaaaggtacaaaaaagcacggttaaagcgtactgtttcaaatgatttatgtacttttgtcgcgctttaaaaaacaaaaaacaagaaatatggacgattcaaacccacgaacgtgcaatagtatttataattaaagcgaacagagacgttgtccgcaatgcctcagttcgttcctaaagaaaggaggccattacgatgagaacgtacctttattctgaagccggctttatagaaaagtcgcaatggatgcccaatagctgggtaaacgttgaatgccccgatgacaatgattttgatttcctcacccaagagttgaaagttccggaatcttttttggaagatatcgccgatgcggacgaacgcccgcgtacggaaacggaaggcaactggttgctaaccatcctgcgtatcccgatgcagagcagtcagcatggcattccctttatcaccgtgccaataggcatcattaccaataatgaaattatcgtatcggtatgttatcacaagactgaactcatctcggattttatccaacatacacgtcgcaaaggtatcgtagtgaacaataagctggacttgatcctgcggatgatttattcttccgccgtctggtttttgaagtatctgaaacagataaacaatgatgtagccaatgcggaaaaagagttggagaaaagtatccgcaatgaagacttgctccgtctgatgaagttgcaaaaaacccttgtctacttcaacacttccatccgcggaaatgaagtgatgatcgggcgattgaagaatatcttccaggataccgactatctggatatggagctgttggaggatgtagtcattgaactaaaacaggcatacaataccgtaaacatttacagcgacatcctgacaggaacgatggatgcttttgcctccattatttccaacaacgtcaatgctatcatgaaacgcatgacgagcctttccatcacgctcatgataccgacactgatagccagtttctacggcatgaatgtggatattcacctggaaggtttcccgtatgctttcatattcattatcctgatctccgtaatactatcggcaggaacatttatctggttcaggaagattaagtggttctaaactaccattaccgcatttgtttttgtatcaaagatggtgtagttacgacctcgtgactatcatcatcttcttcttttatttcctcttccgccttttctactttattcaccttgtcggctccggcagcagtaggtcgggttttccaggtaaggcgcgttgtcataacagaaggtttagtactggaaggtttcatgaagctgtccatccaggagtcgtcagcatcgtcaacattcttcaaattcgtagccgccgaagattgaagtacaggagattgggatgcggaagacatctgtaccggctgattcggaacgttcagcaggaaagcatacgtattcttcgtatccttcaaggcactcgaagttttgaagaaagtaactagattcatgattaccagaaagacagccgcaatgggcgcaagagctatgataatcgccagtcggatcagcaacattatgaacggataaaaaagactgtcaatgatatcattactgactacccgcattcctccagaagactttgtagatttaaacgccgatggaatgccgccaatacctgcatatatccacgcgttcatggcatcaccggtagaatgccagatagaaaaacccaatatcatgaaaaccaatacgaaaatgcactttatcagcgcccatactttccgcctacccaaagtagacatttcatcttccgcggctttcaaattacagtcgtggcacaaaggtttgccgtcataagagtaaatagaaccattcagacagttctgacataatcccactccacaagatccgcaggtggcaacagcatagtcattcaaatgtttgtagcaattcatagcagtgtctttctttgtgtacaaagatatacaaagaaagacacttagcctaatgcaacgtcagttttgtttttccgcttcgtatatttcctttacttcgcttgcactcaacactcgtgtatcataaacccgaagattatcaatactcatggaaagagcattcagtgttgtagtcgagtttcgtttcatcgtaccgccaagttggaatttaacaccatacccgtaatcagcctgactggaatttccctgactaaaaggattacaatattccgtagccacgcctacatattcaccatcaatatagagtttacttgtaatggtagcatcggaagttttaggataatccgaagtcaaagtaatcatgtgccaatcattatccaacgcagaatgttcaaaaggagtagatttatcataagacggatatccattaaagtacttagtcacagtgaacttcaatttaccatccaccattgaaaggcagaaattattttcattagtactcttgaccgaatggaaaatatgcccgtccgagagccccttggcccaaaaagatatagagaacttatatttgtcaatcaacccttcgggaatgctgatataactttcattcgcacgactgaaactgatagcctgactgccgttcttactatttgaaatataagtgggagcattcagagccgaagccgttaaagtcgtttctgtcacactcttggtatttccttcaaaagtataatatacatacagcccattacttactaccttggacgcatcttttttctccacaatcattgtcaatggaatttctttattaccaaggtcagtctgcaccactatgttgcaactataatttcctgcagccaaccctttgcggtctattctgacttccacgttgtctgtcgcagaagcagccactgtacccgagttcttactgaaagaaatccaagctacattttcttttgtggataactgataaaaagtcgtcccattataagagctgacagagaatgaagccttatcattgactccaaccgtcagtgattgcggattcacatcaaaactgcgctgcggtttctcttcagcactgatagttatttcctcagacaggccggcggcatttactttgatcgtagttcccatttgccctttcactttggaacgatccaaagtcactgtcacggtagcagacttgcccatacccaaagctccttctgtcggagataccgttatccaatctgcattaatgccggaaatattccaatccagcgtccctgtattacctatattcttaattgcaaatgtcgaagaattcagatcctgtccgaaatctattgcccttggactgacttccagtttcttatccgactctttcactttcatcgtaacaggtatttccaaatcctgcaagtccgaacgtacaatcaaagtacaattataatccccggcttgtagtccttctctcgaaacagacaattccaccgtttccttcattgcagggttagcggcatcatattgcggaatcgtaccattcgttttcgacagtttcagccaatcggtatcgttttcctttattatcagcatgtaagatgtactgccataataggaacgtaaagtcagcgtagacttttcctgctctcccaaagtcagtgtcgccggatcagcttctatacgacgttccaacttctcatccgccgatatttcaagcggtaacgactctccatccgcattaatcaaaatagaagtcttcacatgatcctttatcttactccggtttaatgcaacccttacggcactggactttccctgttccgtctcccccttcatgggagtaatggaagtaatccaatctacatccagccctgtaatattccaacttacacctccactgttaccgatattcttcacatcgaatgtcaagactgactcatccgtaccaaaatccagttttgaaggaatgatttcgattttcgatgttttcctttccacctctgccgtaatcttcaatgacacggactccttatcggcatttataatgattatcagttctttattctctgtcagcttctcacgcaacaaagagacttgcacggcacaacttttaccggcttccaacgctccgcttgcaggatttacttccagccaatccactttatccaaaccggatatattccagttgaattttgcagtacctttattgaatatatcaaaagaaagagacgtattggtcttgccaaaattcagcgtggatgcccctaactctatttttgcatctttcttcacaggggtcaacgtaatatcccccatcgcatttttgccggtaacgacactgacacttttggtattagtgacataatccgcctttcttgcttcaacctggtattgtcccggttccagattcagaaattcataagttccatcatcaccggtcgtccgggaaattcctccgggagtcaacgtcacagttgctccatgcagaacttcaccactttgcgtatccgtcactttaccatatatagagcctgtcaagtcttcctcatcctttgcacaggatatcacaagaagtaacactaataaatacaggcatttattcttaaaagctttcataatttacttagatttattggtttaaaaatgaaaagtcaatgccaatccgttgcattcggcccccatcaccggagtcatcgacagatacttccgtcccgattgtatgcgtccacgcttcgcaccgttagcaatggcagcatccaccaaattatagatataaagagccgccgccgcaccaatacatacgttgcggcctgtctcccaattatccgccttggagttgtaggtcttcgcatgcgcaggctgttccctcatcttttttacataagaagcacgggtattctcgcaaagcacgatagctgccgccaaagccgcttcacctcccagaatggaaagtccttttgccgtactgcctttatacaactgtcccacaccgggaattaaagaatacaccagcccacgaatcccatacttctttgtgaaagtgacttcttgaaaacgtaccttatccgcattattggccacttcaaacaatacccagcaattgtatatgccacttttgtctttttcccaataaatatcaatctgcgtaaaggctgttttaaaattatcaaaatcaaggttatacgtatagttatgctcgatattttccgtataaacatgatcccggctttccgcctttattttctcaatagctgtccccttcacagacactccatgcatacttgccaaatctccaaccagagtcaacactgcgctttcgcaagcatcagacagagttctgccctctccatgggcaaccttgaagtaatagctgttatcatgatttttaggaaaagctccattcttccaacgcggtgcaattttatccgacttatcaggtcgggtagcttgcacacctatgccgcataaacagagcaacaggaatatgaatatagttttcatgtaattactctgttatttgtgttattttgtcagtgatgaaatcagaaatctgtttcgcatattcctgcttgagtttagattcttccaaagcagcattcaaagctttttttctggcatctaaagccttatcttcatttaccaagaaaatgatctgatattctttagccccattcatatctttatatacactataactttccgttaaagttcctttgtttattaaagtaccgagtgctctttcataggcaccgtaaaaacggtccaactcaccggtttccgaatccgccgtagcaacgtcggaagtggtacgccctttgatataggaactcgctaaatttgcatacgtcacaatcgcattgttataggctgcctgacgacagacattggtacgcatacaccctgatgatgtacccaccaattgcgtataattgccattctgcaatttgtcataatgttgtagcaaaataacctcaaaggatctcgaagttgcatccagtttccaaccgtcttttttgtactctttcaacttagttttgtactctttttttagttctttctctaattgcttattttgtgctcttccgctctgaggcattacacacagcaatacaatagtccaaactaccacccaaggtttcatttttagttccataattttagatactgattttaaagcagcaacattgtcactgtttcatgtttgttacttaatttattaatctctcataaacaaaaaaaatcttttcacgttatgtaattaaacggaaagagacgaatcaactgcattctattggcttaactgatactgatatgagtgtttttgtttctttgcaaagataagcatgtattaacattggttatatccactatatttgctacatttgcccgataaaataagagtattcccctaatttttacgaccatggagactgacttgaagaaaatagtaggacaacggctgcaattgctccgtatggaaaagaatctgacacaggaacaaatgggcgaaaagctcaacttgtcgaccagtgcatactgcaaaattgaatatggggaaactgacttgactttgacacggttaaataaaattgcagaagtaatgaatatgtcggctattgatttattcagaaaaatagacgggaactcatatttcaacaattcaagtaccattggaaccagcatcggaattgccagagactgtagtactatcaaaatagaagcatcggaagatcttcgtgagttgataaaggccaacagtaaaatgatagatatgctgtgcaaaagaatagaaatgttagaaaataaaatccagtaagcaatccgattgcttctttattcccactttgctctattcttttatttaatctcactttctttcatccttcattatccccctgtttatcggcattcaggctgaaactaccggctgaaagacagggaaatgctttcaggcttatcattgaggacactcctcacctttcacccctcagcacttctgcatgaggcagcaaataagtaatattacaggtgacccactgaagtcgttcgagtgaacaactttagtcggtcaatcgaacaactccagttgttcacttgaacaactccagtcggtcatcagtaaacaagcacgcgaagatcgcaaagaaagggagatctgcccgtagatactcctcgaagctatcttaatcatatatatgcgaagcggtaactccttctaactcttgattcgcataagtcactaaaagcagttcagtttctatatttttagtgcgaaatagagtgatttataacagaatgtagtaactttgtgatcaaagcaaacttcaaagactatatggaacagatacagagactttatccgataggtatacagaccttttccgaaataaggacaaagagatatttgtatatcgacaaaacggcatacgtctaccacatgacgcattccgcatcaaaatacatgttcctgactcgtccgagacgtttcggcaagtcattgctcgtctccaccctgcacagttattttgaagggaagaaagagttgtttgagaaccttgcgattgaaaaactggagaaagaatggacggcatacccggtgctacacttcgatatgagtacggcaaagcatgcggacaggaaccagcttgtcagcgaattggaaagaaaacttctgggatatgaaaagatatatggccgcggagaaggtgacatagaaatcaaccaacgcttgcaaggcttgatagaacgggcttacacccagaccgggcaacaggtggttgttctcattgatgagtatgatgcaccgcttctcgacgtggttcacgaagaaaagaatatgcctgtgctgcgaaacgttatgcgaaacttttacagccccctgaaagcatgcgacccctatttgcgctacgtgttcctgaccggcatcacaaaattctctcagctaagcatctttagcgaactgaacaatatcgaaaatatcagcatggacgagccctatgcggccatttgcggcattacggaagaagaactgctgacgcagatgtcgggtgatttgaataggatggcggaaagaatgaagacgagccgcgacgaggtcatcgcactgctgaaggataattatgacggttatcatttcacctggccttctccggatatttataatcctttcagcctgctcaccgccatggccaaaggtaaaatcggctcctactggtttggcagcagcacccctacctacctgatagaaatgctaaacaagttccatgtaaagccccagcagattggaggacggaaagtattggccgaatcgttcgacgcccctaccgagcggatgaccgacatcaatccattgctctatcaaagtggttatgtaacgataaaaaatcaggattcattcaccggtctttatacgctcgatatccctaacaaagaagtccgcataggattgatgaagagcttattgtccggctatttaaaccaatataccgccgaaggattcactacagtggcacttctttttaaagcaattaccgaagaaagaatagacgacgccttgcgtttgttgcagacattcctctccaccattccgcaatgcgacaataccgactacgaaggtcattaccagtcattgctctacaccattttcagtctgctgggaatgtatgtagatgtggaagtacgtactcccgacggtcgtgtggacatggtgatgcgcactccatccatactctacgtcatagaactgaaactgaataaaacagcggacatcgccatgcagcaaattgacctgaaaaactatccggaacgctttgccttatgcggactaccgatagtgaaagtggcaataaacttcgacagcaaacgacatacgctggaagactggattatatcgtagcctgaataactcctttaactcctaccatgaataatgtaggggagacgcttacgatggctgaaagctgaaatgtcccttcagaacactctttcagctgaaaggccggtaaacaaggaggttgcggaagctgaaggcactgaaactgtttaagaacaccgaaaaaaacgacaacttaaatcacactcaaaaaaagaacgtggtcagtgttacttgagagattctcaagacaattacacatattctatcccttcgacctgaaaaattcgcaaataatacgtatgtttgcgccaaataggtcaatgaacatgaaaatacacagaaatctaatgcttgtatgcctgctcctcatggcatcaatctcttatgctcaatccgaaaccatcgttgtaggaaaaaaagcggacggaacggacttaaaagcacagtgctacacttttccgcagcgggtggaaactttctccatgagtgataaaggcgattatctctgcgtcagtttcagggaaaccactaaaagcggcaagtatctgaagaataaaggagaaataggtttctatgacacaaagagcagtcagctcctatggaaacagccgattgacttcagcaaatcacggataacttgtctttcggaaggggtcttgataactgaaatcggcagcaagatatcattgctcagtagagaaacaggagcaaagagatgggaagccagtttatttccggtatatgtggacgattcattgggattggtcttaggttataactcccctacctccaacaaactccgcgctgtcaacttaaaattcggtaacgatctgtgggaaaacaaaatacctcatcaatacggttggaacgaagttcttgatctggaacaaaataaacgcctgattgtagcggatgcattgcataaactggatttcatgaccggagagttactgacctatccgggaaagccgggagctcatgatacaaaagcagcattgctgcaaggattagccgctgtagcagtcggagtagccggtggcgtagcaaccggtggtgcctattattacagctatgttcccattgccaataatacaatcacggggttgacttccaatatactgtctcaggattcactttattactgggcagaccgtcaacacatctcctgtatggacacggctttcaacgtagtgtggcaaacagagtttcctgatgtgaaagcttcccgctctaaacttttcgtgcaagatgataagttattcatgctgaattacggctacggattacgcgaaggagcaagccgcaagaaatatgggcgcccatttatagcctgttataacttgctaaacggagaagaaatcttcttcaaccaactaagcgtaaagaaagatatgattgaagatgccctgcgaactgatgacgcactctacatgctgtttgatgacggaatggcttatcaggagctgacggattccatcgtaaatattgtaccttgggataccaagcaatacggaaagctggaagcgatgctgcccggtacattctatgcagccaacaaagatacaaccgctttcaagtcgctcgctttcgatggagaacattgcctggtgtataatgatcaaggagttatctatgaagtagacaaggatttgaacatcaggagtacctatgaacgggagcggatttacagccccagtatccaactaaaagattatttatgtatcggcaatcgtggagactattggttcattcacgaaatgggaatgcctgtagcccatcttgatacggagttcaaaaaagggcgggtgattggtaataagctactgctacttaacaatgaaaatcaattcctgtttatcgatctggatgaagcgatagaataatcacttgaaatcaagcgctaactgcccgtcacccaacagattgaatgtcatgcgatgataaggcgtagttccacgttcggagatggccgcacgatgtttcttcgtggggtatcctttgttatggtcccaatcataatatggaaattcttcgtgaaggtggttcatataatcatcacgataggttttggcaagcacagaagccgccgcaatggaaaggtatttgccgtcgcctttaatcaccgtggtatgcggaagatcctgatatttcttgaagcggttgccatctataagcagatgctgcggacgcatctttaattgatctacggcacgatgcatggcaaggaaagaagcgttcagtatgttaatcttatcaatctcttcgggagatacaatgccaaccgcccatgccagtgcttctttctcaatcacttcacgcaaagcatagcgctgatgttccgtcaactgtttggaatcattcagtagttcgttcttgaaatctttgggaagaatcacggcagcagcatatacagctcctgccaggcaaccacgtccggcctcatcgcaaccggcttcaatcagatctttattcaaataaggcaatagcatacagcattaatttagaggcacaaagataaatctttttgaaagcaaacctgacttttaaaggaaaataattacatttgcagaaacaacaaatatactatgaagcaagtactgtatctaatatttgcagtttccctattaaccacgatccccttacaggctcaagacggcaaacaagcccagaccttattagaacaagctcacaatgccctgttcagcaatcccaagcaggcatcatactatgcagctcaggcagctgccttatttcccgaagacgaacccaatgaaacccgtgcacaagctatgatactctattgccaagcagaacaactgttgggcaacttcgatttgagtatcaagaatttatacgatacacagagatatatcaatcccgcaaacaaacggcaaacagctcagctttattcactcatgggacgtgtatatagtaagttgggcgattataacaaagggatagaactaaacgataaggcaacctctattttcaagtctttaggagattcagcttcagtggccggatgttataatgagcgtggagtcatgcattatctgcttgatgaatttctggtagcagaaagatttcttcaacgggccttgactatcaatcgtgcccaaaggaacttaaaagagattgctaccaatctgaacaatctatgtctatatcaaggagatacggaaaagaaactgtcctttattcaggaagccatagccatcaataaaaatctggatgcacaatggtcattgggagagaactacaacaatatgggcaagcaatattacttcggcgagcaatactccaaagctttggaagctctgcagaaagcctatgaatacgcccataatatcggtgccaaggaattgatttgtgattattatgaatattcgtcctgggtatatgccgccataggtgattatgaccaggcctataaacggctcagtcaaatgtatgctttaagcaaggagctacaaagtagcaacaagttgcgtaacattgaacaggaaatctcttataaaagatatcaggatcagaaatatgctaccgaaatgcaggagcaaacttataagatagaactactaaagcgcaatctatggcttttgggcagtatacttattcttggtttagccttcagtatattcttatataaatggtataaacgcagaaaaggtcttcaactaatagaagcccgttatcaactggaactgtcacaacgggaaatatccgaattgaaactgcaccaacaggaattggaactgcaaaatgtgcaaagtgctttagacagcagccaacaagaagtaaccagctttgccgtatttcttagaagccgtaacgagttgctgggcaaaatacgtgagatgattaaggaagggtatagaatggataatcaagcactggttccccacttaaagaaggtgaatgcttttatcagccaataccaaagcggagataagaccaataatacattgctactgaatattgaggagaagaataaagaattcattgaaaagcttacaaaggaacaccccaacttgacacaaggagaaaaatatctggcaacaatgctgcgtgtcaatctttcaacaaaagaaatctcaatgattagcgggaatagtcctaaaacaattaatatgaatcgctacagattacgtaaggctttgaacttaccaacagaaaaagacctggtggaatacttgcaaaacttctaaagttaccattacagcagatgctatgtttgtagatataacatcacaagatttattgttgtatttcagctatttacaaatattgttgtagattaaaaactcatagatttcaccctctttgtagacattttacagatcattcttcataggaatactccaaattatatctctttctttgccatgtgagaaacaaatgttattaaccttaaaaactatcacacatgggtaaaattaaaaagtattccttaatacaaagagccgctttgttggccttgctctttgtatgtttggtaccgctaagttctttagcacaaaccatccaattaaccggtacagtaaccgacaccaaaggagaaactctcattggcgccagtgttttggaaaaaggtacaaccaatggttgcattaccgacatcgacggtaactttgcactgactgttgctcctaatgcgacaatggtaatctcttatgtgggctatgtcgctcaagagattcctctgaacggacaaaaagtattgaaagtaactctaaaagatgatactgaaatgctggatgaagttgtagtaatcggttatggtacaatgaagaaaagtgatatgaccggagctatttcttcagttgacacagaagaattgaccaagcgtgctacaaccaatcccgccgaagcattgcagggaaaaattgccggcgtaaatattatgaaggccggtggtaatgcgggtgcaggtatttctgtcaagattcgtggtgtaaaatctttcggcagcaatgagccactttatattatcgatggtttccccggagatattgataatgttaatccgcaggatatccagtctatggaggtactaaaggatggtgccgctgccgctatctatggttcggtagctgccaatggagtaatcatcatcactactaagaatggcaagaaaggtgaaacacatattgatttcaatacatacttgagcatgactactgtagccaacaaactggaaatgaccaatgcggagcagtataagaatacgatcaaaaccatgttcgaaaatgcaggcaaaccggttcccgcctattgtaccagcgatacgggcataaacacagactggcaggatctgatgcttcgcaacggtttatcccaaaactatatgttcagtgtgcgcggtggcagcgaaacggcacaatattccgtatcctataaccatgctgacgacaagggtatctttctgggcaataacttccgccaggacaatgcccgcatgaaaatgcacatgagcaaatacatcttcgacattgatgccaacttgagcttccgctataccaagagcaaacagccacagtacagtttgcgtgagatgtacggtctttctccgttgcttcccgtttatgacgagaatgagaaatacggctttgccttgacgcaatcgctcggattgccaaacaacaataacgtgatggccgaccacgtctacaacgaagccgctaccaagaagttctataccaatgccaacgtatcactgggtgtgaagctcgctccctggttgaactttaaaaccagctatgcctaccgtggcttgcactaccgttacgtggagcacaatccggattacatttctaatgcacaaggtccccacaactaccccgagcactacgagggaacttattattgggaagagcaaaccattgacaacgtgctgactttcaataaagatttcgacaagcacagtttgaatgtaatggccggttcttctatcacttccaccaaatataccgacaatggcgtaggtgtaaccggtaagtctaccaaatactacattgatgccaacggcaacctggccaccaaggacgaggcagccggtttcctcgacccgagttttgatacagtggatgcaggtatcggaggaacgttctacggtgacggcgaaaaatacaaatataaccgcgcctctttcttcggacgcgtgaactataactacgacaaccgttacctcatccaggccaccatgcgctacgacggttcttccaaattcggcgtgaacaaccgctggggttgtttcccttctgtagctgtaggctggagaatcagtgaagaagccttctatccgaaagatttcttcatcaatagcctgaagttccgtgccagctggggacgcctcggcaacgagaacgctttgggatattatgacttccaggccttgattctgtctcgcaacaatcgttacggcggctacatacaaggtggcaacgcctggccgggttctgcttcatggactatggaaaaccgcggtctgaaatgggaaactaccgacaccaaaaacatcggtttcgactttggcatgctcagcaacaaactgacaggtagcatcaactactacatcaaccagacggaagatttgctgattaccaagcgcctctctccctctgccggctaccagaatcccattctgaacgtgggtaagattcgcaacaacggtgtggaactggaagtgaactggaccgacaaaatcaaggactttgaatacaacgtgggcttcaacttctccacaaccaagaataaagtagtggaactggcagacaaaggacaagcactgcccgccaccggtctgctgtacgataccgaccatatcccggcatacgccaaagaaggcaaacctatcagcggattctatctatatcgtacagatgggattttccaaagcgatgcggaagctgaagcttggaatgccgaacacggaactattgtcatcgtcaacggcaaagaagaatgggtaggcatacagcccaacgccaaggccggagatatacgttttaaagatctggataacaatggtgttcttgatgaagatgacaaagaatactgcggaacaggtatccctaaattcgaaactaacctcaatttctccgcttcttacaaaggtttcgacctctctttcagtttgagtggtgtattcggacataagatttacaacggtaaccgctacttctatgaatccatgaatgctcccctcaatatgctgagcaccgtagccaacgcctggacaccggaaaacacacataccgacattccacgtgccgtgaacggcgaccccaacggtaactcccgcgaaagcgaacgctttctggagaatggtagtttcgtccgcttgcgccaggctcaaatcggatatacactgcccgtatctctgctgaagaaagtgaaaatagaaaagctccgcttctatatcagcggtgacaatctgttcaccattaccggttactccggcgtagacccggaattctcaaccagcagcccactgaactccggtgtagacagatacatctatccgtttacccgctcctacaccgtgggtgcacagcttacattctaatgtttaacttaaatataaaagaaacgatatgaaaaaagttctatatatagcaagtatgtgtctcgcaatggcttttacgtcttgcgatgacttcctgactgtttcttctcccgacaagctgactaccggtaacttttggagagaccaaaaagatgcagaagccaccctggcttcggcatacgcccaactctaccacggcgacagctatgccaccagtgaagtgcgctggccggtggaagcttaccgcaccgacctttacgatgtaggtaacgatgccaacaattaccaaacttggacagacatctacaacttcacctataccaacggaaatacacagttctcttattactaccaagacctttaccggggtatcaacttcaccaatcaggtattggagtacgcacccaaaatcccagcagaaaacatcaccgaagccaaacgcggagagattattgccgaggctcattttctgagaggttacttccacatgatgctgttgctgaactgggagaaaattatcctgcgcgacatctacatttcagatgcagccgacctgaacaagccattgagcgaccgggtggcttgctgggaactggtaataagcgaattgtcgcaagccactgcattgcctgccacacgccccggctcagaactgggtcgcgccacttcgggagcagccaatgcctacctgggatttgcctacctgacacgtgcttatgaagaacctgccaatgagtcggcccacttaacagcagcactgaaggccctgaatgaagtgcaaggctacgaactggtagacagcgacaagatgctgcaaatgttcaacggcaagaacaagaattgcccggaatccatcttcgagttgcaatattctgccaacactgacaatggcgccagctactactcatacgtacactgtttcattgcctgctctgagattggcggttgggatgaaatcctgcccagcgcccgcctggtggaagagtacaagaaagaaggcagaaagacatcggacgggttgtacgaccaacgtctttataatacgatttacttcaaggatgactacttcaacgacgctgataacggcgaactgatttttggagagttcacttacgacgagtgtttctggagatggagacagaacgagaataagaagtatgtggatgcaaacggcaatatcattgatatcccgacaggagaagacacagacgaatatctggaatctcatggtggcgtgaaagatgtatacgaccgccccaacttccgccgcttcactccggaaacatatgaggaactgagagactactgtccgttcaacattcctttgatgcgctatgctaacgttatgttgatgaaagccgaagtactgaacaagcaaggacatcccgagcaagccattcctctaattaacgaaatcagagccaagcatggaaaaatgcctgctatgaaaggaacatcacaagccgaagtacaggctcaaatagaacatgaacgcatcatcgagttcccactggaaagctaccgctggtacgacctgcgccgctggggcaaactgagcgaggtgctgggcaaacgcggattttcggaaggtaagcacaacttcttcccgattcctttgtgggaagtcaacgcaaactctgcgttaaacaacactacagaaggaactgaagaataatcctctctttaaatataccaaaataaggcggcgtttgcctgcggcgatgccgccttatttacctttaaatgaattatctttgccctcaaaaacgacatagatatgtttacaattatcggactgatgctcacaggaatgctgctgggctacctcttacggaaacggaatttaagtaaaatacataaggttatcacagtactgatctgggtactgctcttcattctcggtattgaagtgggaggaaacgagcagattatcaaaggactgcacaccattggccttgaagccgtcatactcaccataggtggaactctgggaagtgtgattgccgcttgggcactgtggagggccttatacaaacggaaaggaggacaagcatgaaaggaagtcttatcatagtcggcttttttgtgctggggacactttgcggagtctttcacctgatacctatcgacatcgtagtagatagtaaagtcagcttttatgcactttgcgcactgatgttcagtgtagggctaagtgtaggcaatgacccgcaaacgttgaaaaatttccgttcactcaatccacggttgatattcctgcctatcatgaccattctgggcacgttggcaggttctgccgcagtcagcctgatactgacacaccgttccctgacagattgcctggctgtaggttcgggcttcggttactattcactctccagtatctttattaccgaatataaaggagctgaattagggacaattgccctgctcgccaacatcagccgtgagattctgaccctgctggctgcaccattactggtgcgctggttcggcaacctcgcccctatctctgccggaggggcaactacgatggacaccacactgcccatcattacacgaacggccggacaacagtttgtagttgtctccatcttccacggatttgtagtggatttcagcgttccgttccttgtgacactgttttgttctatttaatactgttttgaaatgacagcttagaagcgaattggtacgcggacgacacagacgaagcggacaaacgcggattttaattttcatttcagaacttaaagcaaattatcatgaaagctaaagtatataccttactcttttcctcattgctttgtgtttctgccctggctgataacgaaccttggcagaacccacaaatcaacgagataaacagagagccgatgtatgcgcacttcatcccatttacgaatgaagccaacgctttgaaacaacgctctctccccgccgatgtgcgtttcgatgtgaatcccgcgacagaaagacgagtttctctggatggaacctggaaattcctgttcgcaaagaataacgatctttgtcccaaggatttccataaacccggatacaatacccggaaatggagcaaaatacaagttcccggaagttgggaactgcaaggattcgatgctcctatctatacggatacccgctatccatttcctgccaatcctccgtatgtgcccaccgattacaatccggtaggagcttacatccgtgagtttaccgtcccgaatggttgggaaggtatggatatcttccttgacttcgaaggagtggaatccgcttattatgtatgggtgaacggtgagcttgccggatatgccgaagacagccgtctaccgtctcacttcaacgttacgaagctgttgaaaaaaggcagtaataaacttgccgtgaaagtattccgttacagcgacggctcctatcttgaagggcaagactactggaaatacagtggcattgagcgggatgtatatctctatgcccgtccgcaaagccgtgtccgtgacttccggatgactgccgagttagtcaatgattacaaagatggggaactaaacctcgatgtattacttcaccagccgaaagtcggagaaagcgttgaagtcaaggtattggataaaggcaaggagatttacaaccggaagaagtccatcacttccatcactgatactctgttcagccaacaggagattttcccgaatatacgtgcatggaatgctgaaacgccaaatacttacacattagtagtcagcaccttcgacgcccagggaaaacctctggaatctttcactcacctttttggtttccgcacggtagagatgcgcaacggaatgcagatgatcaacgggaaagcagtactgtttaaaggagtaaaccgtcacgagcacgatccacacaaagggcgcactatcagtgtcgcttccatgatacatgatattcagttgatgaaacagtttaatctgaacggtgtacgcaactgccactatccgaactactctgcctggtacgagctttgcaccgaattcggtctgtacatggtggatgaagccaatatcgaaagtcacggcatgatggatcacaaggatggaacgctggctaattatccggactgggaactccccttcatgcaacgcatgagccgcatgattgcacgcgaccgtaactactcagctatcgtcacctggtccatgggtaatgaatccgggtatggcaaacattttgaaacgctgtacgattatactaagaaagtagatcctacccgtccggtacaatacgaaggaggcggctacgatgcaaaaagcgacatttactgtccgatgtatgcacgtatctggtcactgcgccgccacatcaatcagcgtgacaaacgccccttgattatgtgtgagtacgcccatgcgatgggtaacagcgtaggaaacttccaggattactgggatttgatttataagtatgaccagctacaagggggatttatctgggattgggtagaccagacattcgccatcaaagataaaaacaaccgtgatatctgggcattcggaggtgacatgggctttgtaggcatcgtcaacgactctaacttctgtgccaacggattggtagctgccgaccgttctctccatccgcacatctatgaggtgaagaaagtattgcaatacattcacttcgaaccggtagctttcactccgaacaagataaaagtcagcaatcggcatgatttcatcggtttggaaggatataccctgcgttgggcagtagagtgcgacggaaaagcggtacaaggaggtgaaatggacttccccgtaatcactccgggaagctctgccaatatagaattacccttgaaagcattgcctgccgacggtaaggaatacttcctgactctgcgcgcattcaccaagcatgaagctccgctgataccgaaaggacatgaagtggccatcgagcaatggatactccccacgactcaaatcgccggaaaggttcagcccgccaacagtacattggcaatagaccggaataatgaagcgatcacactgaaaggaaataacttccagataaccttctctacccaaaacggtgagatgacagaactgatctaccatggaaagaatctgattaaagagggattacaacccaacttctggcgtccgttgacggacaacgatattcctaatgggcatctcaatcgctgcgccacctggaagactgccggaaaggatgctaaactggagaatctggaagttacggagaaacagcagattgccaccgtaacggctacttataaaatggaagcgcaaggctctacattgcaaacgatctatgatattcatcctgacggtgccgtccgggtgagcatgcacttcaccccgggcaaacaggcgctgaatgaaatgcctcgtctgggtatgcgtatgatacttccggcagaatatgaaatgatgtcctggctgggacgcggtccgcaggaaaactatgcagaccggaaaacaggagcattgataggcctgtataatgctacggtttgggaacaattccatccgtatgtacgtgctcaggaaacagccaatcactgtgatgtacgttggattgccctgcgcaatgttgccggagaaggtttactggttacgggagaagagcctctgagcgtaagtgcctggaacttcccgatggaggacattgaatatcgtccctcgcaggtagaacgccgtcatggaggaagtatcctgaaaaaggatataatttggctaaacatcgatcaccagcagatgggtgtgggtggtgacaatacctggggagcacaggtacatcccgaatacaccatcacgccacacgagtggaaatacaatttcacactgcaaccgctcggagcaaaggatgatgcggcagaacaggctcataaatgttggttctaatatgggtacgcggacgacacggataaggcggaggcgtacccattctccctaaaattatcatttatcacccctaaaaagcaattattaagttcataataataacgaatatgcgacataagtttatacacaccatttgtattactctgctggttgcaggcatcgccgcctgcactcccggcagcaaaaacactgcggagaagcgatataccttcaataatatactggatatcgcctacactcccgataccttgcaccgctgctacggctggttcacagatgctggctcgtggatgggtttcactcttcccgagaaagagaattgggtaaacggtttctgcggtccattcagtctggatatgttccgccgccagtggatggctcaatccgctgttacggtaggttttagtcagaaagtctcagatacctttgtgcctgactccacctgttactatcccggagaactgtatatgtccgcccattccggcaacggaactatcacccagcggcttaacttcgtaagtgcctccaccgcattgcttcgtatagaagccgacaaagcggaagaactgatgctgaccggcagccaatgggggaagaatataaccgtaagcgtagagcagaactctgtaatagcccgccatcccagtggagaaagcgtaactgtaacgttccctcccgatgtggcacttaccggaacggacaacaattacaccgcccttatccacacctctaagtatcccgtaaatgtagccatttccttcttcacctccgaaaaggaaatgacagtcggattacagaacctccccaacctgctcaataatcccgagaaagcattgcaagccaatgccgaacgttgggaaggatacctgacgaagatactgcgtaccgacatgaaacccgaatacgaccgcatcgccgtgaaagccgtaaccactcttatctccaactggcgcacccaccgtggcggtctgttgcacgagggaatcgttccaagccatgcagcaagctactttgtaggtttctgggcatgggatacctggcgtttcagtgcggggactgctaagtttgatcctgaactggcaaagaataacatccgcgccatgttcgattatcagcaaccggacggcatggtaatcgactgtatctacactgatccatccgaaaacaatgcccgtgacagcaaaccgcctttggtatgttgggctgtagacgagattttcacgcatacaggcgacacggctttcgtttccgagatgtatccgcaactgctttcttattataagtggtggtatcagaaacgcgaccataatcataatggtatgtgcgaatacggtgccactgacggtactctggaagcagccgcctgggaaagcggaatggacaatgccattcgttttgacgacgccatgatgctgaagaacgacggaggcgaggatgcctggagtatggaccaggaaagtgtagacctgaacgcctacctggcactggaatgtaagttactaaagaagtttgccggattactgaatgtctcattcgatgctcccgactatagtaataaagtagccgattatttctttgatcccaaactcaacttcttctttgaccgccgcctgaaagacggttcattcattgaagaaccgggatgcgaagcctatactccgttgtggacacagattgccacgcaagagcaggtagataagatgttacccatgcttcaggatacagcaaagttctcaacgtatattcctttccccaccattgccgcagataatcccaagtataacccccgcggctactggcgtggtcctatctggctagatcagacttactttgccattcgcgggctccgcaactatggttatcataagcttgccgatgaatatacattgcaggtattcgaccgcctcaacggactgaaagaaggagcacccatccatgagaactacggcacgcacaccggagagcgactgaaagcgccacactttagctggagttcatcacacctgctgatgatgtacgatgattacgggaaataattccccgtaaaaaatgcacaaaacataaccaatagaaatctaactcatattctggatattagctatatacatcggacgcgcagcatctatatatcgaacatgtcgcatctatatatcgggcatgcagtatctatatatccaataccaccgatatatagatgctaaaagagcggaatgaaataaaagcgttcagtttttctaatacagatgttcctatatcctcgaaaaacagttctccaaatgccacacttaaacgtccgaaatgccacatctcagtaaccggaatgccacacttgaagaagtgcgaagtatggcattccgggtgtttaagtgtggcatttaaggtacacagatgtggcatttcaaacgcttaagtgtcgcatttataacttgaactcaggggggactaaataaaagttgatgtgatttaccctcactactctcactcttgaaataagcggttgatagacaaaatattaagtgtgagtgagagtaaatttttggcgtgagggtaagttccctaccctcgcgccaaaaaaaacatttctacagatcaacttgctataacacaataagatatcccacgtttaacgtagataccgtataggtccgtaatccggcatttttagctttttttccccgcatagatggcggtatgtaaccctttccaaggattattctcctataaatgtatagtttctgtagagttcacgtgcctcttacatcatccgtcaggatccgattattgcctgaaattacattgcttgttatggatgagaacaagcaatgtaatcacccacaacattacttgtaccggatcacatcattacttgttttcaggtcaaatattcttcaaaaagaacttgatcattcttcataaaacaacttggtacataaatgatcgtttatccccctatttattattagcctattgaagaaataattttccaacaggaaaaatagaatcacatttataccaagttattttttaagcattacttagtacataatcttttggaaaagaaagaaacttttggcgcaatcacccagaacaaatacaacttttacaaagaaactcaaaaataacacaaacgaataatcactaaatttaccacaatagtaggctaaaacgattatttagcgcaaaattcgtcttttttcctattatcaaattatttattcctgtttttattaaaatattttttgtaattttgcagtgcgctctcgccgatacctcttatagaggtaatggggtgggagggcaagacatatatttaagaaagacgtttacttaacgttttgtctttgacgcattaaaacttcgcaaattttaatccaaagtcaaaggacaaggcaacagtaggtgtctgcgggatatgtttatatatcttctgcatgccttataacaataaggtatgtttagttgttatacatatcggcgtgggcttctgcgttgctcgttcagactttggagggcaatgcgaaggccttaatgcgtgggacgagtaacaggtacagattcccgcgcttttcttttatatatagttatcctctaatcttaacacaatgaaccgtccggttcgggaatctgcgggcaatatattacgtgcattcacctgattgctaacaaataaaatattgcattatgtcacaaaacaaaacagtagtcccaggcatggaaagcggcaattcttacggaaaagcccaacccgcagaaccttatgcgagaaatacttatgcaagaaacgcagccaaaggaacggtagttcccggtatggaacaagtcaacgctccctcgcataaaggtcaaaacatccccaacccttcgtccgattcctcccgtcaatccgggaaacctgtagccggttttctgtattctatttcacgccaagggataggagaatattggccactctatttggggcaaaataccataggtagttctcctaaatgcgacatctgcttacgggaaggaacagtttcgggagagcatgccgtcatagttgtacgaaagatgaaaaatccggaaaagacaattgcctctattagcgacacacgctccactaacgggacaatggtacaaggcgagagtttaggattttcggccatggaatgcttcaacggaaacatcatcacaataggagagaactatgaattggtgttgctattagtagatgtgaaagcattagggctaaaggttgcggaaggattcatttcaatagacaaccagccggaagaagaggaagacatgaatgttcctgacccatacactcccggctatacacagcctggaagtgaaggcatgtacccgcctccatttgaaggttcgcacggcacatacgacaactacaacaatggttcaaacggcacagtaggcatagacggtagagacaacatcaaatccggtggaacagtaggcatgtaattcaaatacagaaataaagaatggctatcattaaattacaaagtaatatagaacggcaaaaaaaactttattacgaattcgactccgcaagtgagccactgggtgaaggcggaatgggaaaagtttataaagggaaatgcgtaaatgagcaaaccggcatgttcagggaagtcgccattaaattcatgttcagcgatttacccgaacatgcgattgaacgtgcccgccgcgaagcatccatccaattacgtaacgacaatttggtggaaatgttaggctttatcgagactgccgaaagaaacgtaataggggaaatcacaaagcggtatcatgtggtaagcgaattacttgaaggcgtaatgcttgatgacttactacaaggtaaaacaaccgaccagaatggccaccctattctttttgctgaaaaactataccacgactaccagaataatcctcttcaatttgccatcagtgttatacgcagtgtgctatcagggttaatggcactgcacgatgccggttatatccatcgagacattgaccctaccaatataatggtaacccaaaaggggcacatcaaactgatagatttcggcatagccaaacctatcaacaccttgactacacacgacaaagcactgactacagccggcgtgttcatgggaaagccgtggtatgccgctcccgaactggtattgggtgatgtaaaacatcaaagcatgacaacagacatctatgccatcggaatcttgttctaccaactttatatgggagtacgccccttcgaaggagccaaccacgaagtattagacatgcagttacacaaacagatgccactaaaagtgattccacggaaagatgtcagaacaatcatagcgaaagccacaaacaaaaagctggagttacgctaccagagtgccgcagagtttagagtggatgttgacaaactgccccccactcctactccctcccccaatccgattcttaaatggataggaagcggcataggaattgttggtgtagcagttgtggcatacttgatatttagaccgacccccaaaccagttccagataatagacatacgaacacggaaatcgttactctatctgcatataacagagccgttgtaaagttgaagtcaccagaaacagctcaagaaggattaagtgaactggaaacattgtcacaaaacaataactacgatgcaacctatctgctcagtcgcctcagcttcgatgcaaaaaacaaaaaagaatatgacaatgtgcccgattccatctgggtgctgcaactaacttctaaagtcaatgtcgactatcaaaaagcccataagctattagagaaagccgtctcgataaatccgaatgactgtaactctctctatgctttaggtttcgactacttggtgggcgaccgggtcacttatcaaggaaggaatctcgctgaggcaaaaaaatgtctggacaaagcattgcaacttgccaccaacagcgcaaaccaaactatagtaaaagctgtggaaaaattatatgaagagtatccggaactaataagaaaataaagaaggagaagcaccatgcaaagacaaaatattgtccaacgtcctaatgatccctatatttatttgtttgtaatgggtgaatggtactgctacaatcctgcggacgaaccgttaggaagtggtgccatgggaacggtttatttaggatatcgatgcaagaacagcgagaagatagctgtgaaacgcgtaaaagattgctatgccaataacaaaatgatacgcgaccgggccaagcaagaagcctctcttgccttccggcatcacaatctggtagaaatgataggctactgcgaatatgcaccggacaatggtcctgtatttattctaagcaaatttgtatcgggaatgcaagttgacgattacgtgaaactgaatctggaggatgtagttgacagagtggaaaaaatctgtaacatcatttaccctgtacttgatgctctggactatgtacattcccgtggagtaattcatcgtgacataaagccctccaatatcatgattgaaaatgaatcgaatatccgactgatggacttaggtatcgcccgaatgaacggtggtaataaattctcagcatacggattcattggaactcctcaatattcggcaccagaacaaatcacccgtaacaagaatagcatcatccaaatcaatgcagcaacagatatctatgaactgggcattaccttctacgaattattgacaggagtaaatccttttgatatgccgacggaaacggaaacgctgacaaagcaaatgaaagaagctctcccaaacaatgacaaaataccgagaagactgatgcaagtgatatggaaagctacggaaaaggaacaggggaaacgatatcagatcgcttccgaattcaaggaagccattaaggaagccatggcagctccagtttcaacatcaacccaaatacaagagtgggtagaggcgaatattggcatttgcataggcggaatagccgttctgattataattatcggattactaacattcattttataataagtcattatggatttgacacaactaaagactgaatctcccttgattctaggattcgcagaatcaagaataggagggcgttcggaaaatcaagattcgttcgactgggcagatactcccttaggattcctcgttaccgtatgtgacggcatgggcggagggccaggagggaaaacagcatcttccatcgctgtcaaagaaatcatagcaggagttatggaagccgatcaacaggagagcccttcaaacatcctgatcaaagccatccgccgagccaatatggccattataaatcgtggtaccgagcaacctgccctccaaggcatgggttcaacatgcaccgtagtactaataaccccaaaatctgccactgtagcccatgtgggcgacagcagagtctatcaattcagaggaaatgagaaaatcttccgtacattcgatcattccatggtgtttgaactcgtgaagcaaaaagtgattactgaagagcaagcacgcctttcggcacaatccaacgttattacccgcgcactgggcatcaaacccgatgtggaggtggaagtcacagaacgtcctttcgaaacgggagaccgctttctactctgtacggacggaatacatggagcagtagaagaaaaacatctgataaaactggctaccaaccggaaatccaatctgggaccagtggtagacagtattgccaccgacatcgataacatcggacatactacaggcggaggtcatgataacctaacattggcaatcgtagaaacgaagtctaactcaacactgaaagaaaaaatgaacagaaaaattaaacaaatcttgctgattatcggaataatttgtagtgtaagcattatagccaatatatacttaactgtaaaggtcgctaaattcaataattctaatgagggcaaattgcacacaatgtgcgaaagattaaaaaacgactcaatccaaacggccaaacttattcagaatatagagaaagtaaatggcgacagcgcaaaggtttccaaaattatcaatagccaaaaacgccaacaacaatgaaagcattatctatcggaagagaccaagagtgtgacatcattataaatgatgcaaccgatgttataagcaggcgacatgctactctaaacatttcgtcttccggaaaaatcacaattgtagacctaagtcgcaacggtacgtatgtcaacgggattcgtatttccccaaatgtacctgtacccgtgagcagaaaagatattatctcttttgcacacgtaaacaagttggactggaatgcagtaccaacatataacagcatgacacggtatatagtcatgggaggagtgggaatattcatcgtagcatgcggtatctttgcttatcaatatatgctggacaatccgtctaccccagagccaaagcaggatactgtcagtgttacggactctctcaaagtggaaaagccgggagtagtcaaagattctatcaacataaaaaaagaaccctctaaacaaaaagaagactctatttccgcaaagcctcaaaaacaaaaagagaaaaaaggagaaaataagaaagagcctactccttctgttccgaaagactctacccggaataatagacctatcggctaatcaataattaataaagatcatgagattacttaaaattggaagagacgcttcatgtgatatagtattgcatagcgataaagtaagttcactccatgctgaaataaccatcctcaataatggggatatcctgctggaagacaaaaacagccgaaacggcacattcctcatgaacaaacccatcaaagccggaacaggcattaccgtaagacggggcgatgccattcgctttgctgatgtggaattgatgtggaaccaaatacccatgcccgaaaataacagcaactataaagccttgttcggagtaggaaccaacttccgtaacgaaatacagatatccggaaatactgtcagccgctttcatgccacattgaaaataggaaaagacggaaaagcctatatccaagaccatagcaaaaacggcactacagtcaacggcagaaaaatcccaaccggacaaaatataaaagtcaaacgtagtgatgcagtggtgtgtggcggtgtgcctgtagatataaaacagcacataccagcaagaatttggagtaaagctattggagttgtagtcactacagcaatacttgttggaattgttttcggtatcaaattcattattgacggagaagggaaaccgaaagattatattcaagctgtgacatatgtacatggttattatcattataatgtgaaaatagtcaatgacccttttattcagattatgcaacaatccaacatttcagattatccccaagagtactctgttggaagtgatgaagctaagaattttggatttatagagaacggaagtgattatggtcccatagggtattccggtactgcatttttcatttctaaggatggaaaaatgatgaccaatagacatatagcttgcccttgggaatatattacaaaagaagagaagacccaaatagatcaaaaaatcagacaactccgagactattggttaccaatcaattctttaagaacatctaatgaaattgacgttttcaacaacagcgattttttattaaaaaaatatttaatggcattatataaatcgggtatgtctatatcacaaattagcagtcttatatccggttacaaagaatctcccattgagataaccggtattcatgactatatagcagtaggatatgcagatcataactataattcgattgacgaatttgaacgttgcacagtattagccgagtctgaagatgataaaatagatttggctatattacaattaaacaacaagcagactcctgccactattaacaaaattgtagacatatcaaaagcgacaacagatgttaaaaaggtaagccctttagaagaagcctactactacattggttaccccttaggaacaagtttgaatctggataacagcgatggaggcttacaacctcgcctcaatgaagtaaaggtcagcagagttcctggtagatacgaatttgatttacaaggagaagtcttcggcggtgccagtggatctcctattttagataagaatgggcacttaattggtgttgttaataagtcaatccggtataccacaatgtctaaaggggtacttgcaaaacatgctaaagacctttttgacaagatagaaaaacaataaaagcatgctaagattcttttttattcatcttttattttgctgctttagtcatctgacctttgctcagacagtgacgtgggctattcctccaacgtatgaatcgttagaagaatatggcgatatttacaaaatcagggagcatgggaaagtcggtctggctgatgttaccggaaaaactttaatcccggctgtatacgactccataactccattctatgagaatcttgcgttggctttagaatatgatgaaggtaaatattccataaaaggaatcataaaccaacataactacggtatggtgaaaatcatagaacgatattatataatggaaaaataccccttcttttccgaaggtaaggttgttgttttcaatgaaagcaacaagtatggctatttacagtccgatggctctttgttcaaagcatgtcaatatcgcaaaacctatcctttctatcagggtctcgcctgcatacaaaagaaagaagacgaaattgcctacctgaaaacaaacggaagtgaactgaccacacagttagagagtgaaagttacattttactgactggaacatctttcaacgaaaaaggagaagcgtatgtgcaggggaaagctgtaggcgtgaagcgctgtatcatcaatactgaaggaaaaacccttcgtgaagcaacgttttccggtaataagctcaaaaattatgaatttcgcaagcccttttactttcccccaattcaaggcactactttacctatagatgaaatagatatattcttaaaaaagggcaaatacggatttgtcaacaaggataacaccatattacccgcgcaatttaccgaagctacacccttcaagggaggctatgccaaggtgaagaaaaacgggaaatacggtgtactcaaattgagttcgggaaactttcaagggatgatggtcaagaatactatcaaagtagaaaacggaaaaagcgaaaccgcgaactaccgtatacaaatgccaaccgaatacttaaataaacctgtaaaggttgaaattgaagaagaaaatagcggcaataagattgtacttagccctaccgaatctggtagagatggcaaagaatatgccttcatcccaacattgcaagacaaggaaactgagaaatcgtaccttttttctttgcaggctgatgggcttcttttgtgggaagactcacaacatatcaccatacaacgtatagaatcttatccccctgtgttatccttgccacaagtcactagtgaattcaaggcagattcggaaggttacgtacgggcagacaagaataataaagtagatatttatgccaccatagaaaacaaatcttcagaaacgctccacatttcaatcacaatagggggtaacggaataactgaacaaacaagaagtttatctgtggctgccaatggtaacggcagaatatcgacttcaatcaatgacatcaaagaacgcaagcctgtagaagtttttgtaaagacatccacaggattgaaacaaagtaaaatcattaaggtaaaaccatttatttaataaaacacttatagttatgagaaaaattttaattcttttggcgctgacggtatttaccatcaacgtatccgcacaagaagaagatgctgtaacggacaacattatcgactcttcttatcgaatttatttaggtccgaaggtaggattcaacatggcatccatgagtggattgtccgatgagtttgcattgaaccctaaaagcggaataggatttcagggaggtttggccgcaaacatccattttgggcgttataaaggtcgggaaaagagtcctggcggtacaggggctttcggtatccaagttgaggccatgtattcgcaacggacaattaagaccgatgcagagaatctgaaacttagttattttgaggttcccattctggcacaatattatgtgacaccggacttaagtattgaagtgggtccctctattactggaagcctgagcagttcacctgataaaatgaaattcaacagtgtacttatctccacaggcgaattaaaaggtttcgacgttatgcttactgcgggggtaagttataagcttaaggtgagtaataagcatgaaaactgtctcacggcaagtctccgctacaacttagggatgagcaagttggccggaaattttgacggtaaggtaaatactgttaccgtatctgtcggttggttgttcagcctcgtaaaataaatataataataacctctaacaagaaaattgtatgaaaaagtatattttagtaatgtttgctattatagcaacttttacgtcatgtacaaacgatgacataactatcagttatgctacgaactttaaaattaatccttccacagtaattgcgccatttacttgggaatggcaagcaggagatttagaatcattcgatacagactatcaattaagaatacgcttgttggtatataactcagacggcatattacaagaggaggatacacagtattttaccaattactcagtaatgatgaactcttccatagcactgcctaaggggaaatataccgctatagctattacagatattattgaaaaaggttctgattttgaatattggacattaaaggattatcagaaattggcagatactcacattgatgatgccggatatattggtggcaagaacaagattttaggaatttccaagagcaatgtcaccattgatgaccaaagccaaaatgacatttctatcaatgtacaaccagtaggatccatcttctttgtatggtatcgcaatattcacacttttagcgacgtaacaagatatatattatcctgtgcaaaaacggcagaaagttgcatattcagcacggacggttcttattctattacagcagaaaacaataatggaagctatgactggagaatcagttacatagatgtagaagattattcgcaaaattccggaatttacagctatttatatgtccttccagtatctaatttaaacctaaaatttcaatatgtcagtagttccgaaagcggtaaccaagacattactcctgtcatgactattaatcctaaagctggtgaagaatgggcctttattcttaatttgaaagatgaagataatgataacggagttacatataactatgaactagttaatgataacccaacatcaaaatccacatttcggacgcaattaaaaaacgttcatcaaggaaataatattttggttaaccaacaaaagttgtatttgaaagatatcaaataactaccactttttttatgaaaaggattattcccttgataggattagcactaataaccttcaatagttgttcatccgacagtgatatctcactgccggatgaacctgccaaggttcctgccattggcgtatatactaaagagaaccaatggatttacgaacaaatgaaccattactatctatggcgtgaagacttacaggattctttatcatgcgattatacaacagatcccgtaacattttacaaagcacttttatcacccaaagatcgcttttcctattgttctcgtaatacaaattacacaggaccggctgagagtatttcatacggcttcgcttatcaaaaatataaaagtgcaacagacggagacttactgcaagtgctatatgtaacttctggaaatttgaaaaaacgaggacttcgcagaggtgattggttaagaaagctctcgcgggaagagcatacattttatgaactgggagaagtaaaagtaggcatctttcatgtgcgcgacactttgtccattgaagccatatcatggaacgaaaatcgaaatactgtttatatggactctatttactccgtcaatgatgcaaaagtaggctacctatgttatctggagtttgatggcacaaaagatttggaagaaccactcaaaaagttctataataaccatattgacgaactgattttagatttgcgttataatccgggcggttatgtacggacttgtcgttatttgtgcaattcaattgtccatgaacagggatataacaaaatatttcagcaatgtacctataatgatagaatttcaaaagagtatttagaaaaaaacggcagtagcatcactaaagagtactatgatataccgactaacggaaatgagcaaatactaggtagtgaaatatacggattgaacctgaaaaggctttatgtattgacctcacaaaatacagcttctgccagtgaagctacgatagtctgcctcagaccattcatggatgtcatagtaatcggagagcagacctatgggaaaggtgttggctcgtggactatcagcgaaaaacaatataaatatatgttacaccctatcatcatgaggtactacaatgcctcgatggaaacaaccccagacgatgggattcctgcaaattgggaggtaaaaggaggatatgaaaccataaaacaagaattgggtgacatgaacgaacctttattggctacagcattgagttgtatcaagaacgaggcaccgtatccttctatcataactctccaaacaagaagcacaggactaatccctgtcggcaaaccatctttcttcaataaaacaaaagtagaatactaaaagaacaaataatatgaaactaaagcactttttctttttcgcattattattgcaaggaatgacaatcgtacatgcaaccactgtacagaaactgttactgaagaatggttctgagttagagggatatatatccatgcaacgcccaggaaaagatttcacattcatagcagaaaaggctatcatctatatgcctgggacagaaataaaatcaattgtcgaccatgaagtaagtatcaaacaactatcttttggatggatagaatgggccgagaaaaacgatgcctttgaggggttgggagacaatcgtatcttgattttaagcgatattataacaaaagagagaactatcagccgagtacgcatattggaaaaaggagccaaaataaagtatttggaaatgaataataatagttattcactaaattgggacacaattgccgttgtgaaagcagaaaagcgtttgaaaactgcattaaccggtatcaaccgcatttacaaattagaaaatggacaagaatacgaaggacaatatgtagaagaagttcccggaaaaacattaagtttatatcaagacaacggtgtagtagaggtgtttgagactgataaggttgtaaggtattccatgcgcaagattaatcccagccaagatttgtttgaacaaaatgaactactggacatcgttctgctaaaagacaatagcatgttgaaaggcattattgtagagcacaacttcaacgccaaagcagcttccggcaattatctgcttttgcaaaaagaaagtggagaaatccaaagcattgatttttctgatatagaagaatatagaaaagaagtaaatcccaagttcaaacctttatttgatattttactaagagaaggagagcttgtcgtagataggcaacagaccaaaactttaaaagtagaagaagaagattcgtacatcatattacctaacgatacatgctctgtcatgataaagagaaaacaacccgtaacagaagttactatagagacccgttttacggataataatcaaaatcaaactttagagatagtaaaagccaaaaagagaatggataagaagaaaaagataagtttttttgcttttacttatgaagacattgtgaaatcaaatatccatcctttatcagtgcagacaagcataaacaaaaccactaaattggtatattcaatagacaataccggtttatatgtaatttacaatccacaaaagaaaactgtaattccttttgaagttaaatagcaatgaggtaaccacatttttattttatcgcttagcttttcaaaaatctaaaaaccgaatcaatatgttattacgtgaagtgacagtgggcagagcaccagacagcgatattctgtacaaccagaattgcattcatgtgagtaatgctcacgccgtaatttattctaacggcaatcaattaatttttaaagacaccagtacaaacggtactcttatcaacaatatgcaaatccatcaccaatccattgtcatcaattatggagatatgattttactggccgggaaatatccattaacatgggatagaatctgtatatttttccccttggaaaagaaaccgacacaattcaatgaaggatataatccgaatatacacaacaaaaccgttgcaaatccagattatcactcaccacagaaatatgaagatatatcttcaaaaagcagtaatacaactaatgtagaagtcgaaattacccgcttcaattggggcgctttcttcctttatcctctgtggggattcgccaatggcatgtggtggctcttccttatctcatttttcttcggatggtttttccccattccgaacctactgttcggtattatggggtcaaaatgggcatggcaaaataaacgttggaatgacataaatcacttcgtagaggtccaagatagctggaagaaatggggaatcggattatttatcgcaaatattttccttttcgtcctcttctttattatactcatggctacagcatagtcttttaggatcaaggcaaacagatgattatatggtttcgtacactctgaactgtcacattaaacacaagaaaagttgcagaggttattctctgcaacttttcagttaacaattaatttaaaataagctccacgcaaccgtcagtccggccatcacgatagctaccatactcatcagcttgataagtatattcaaactcggaccggaagtatctttgaacgggtcacctaccgtatcgcctaccacagtagctttatgtacttcgctacccttaccgccaaaattaccttcttccacatatttctttgcattatcccatgcaccgcccgcattcgccataaagatggcaagaacgaaaccgctactcaatccaccgatcagcaagcccagcacaccgggaacaccaaagataagtcccgtagcaatcggagctaaaatggctatcagcgaaggaactaccatttcacgttgcgccccctttgtggagatagctacacaacgttcgtaatccggttctgtctcaccggtaagtatacctttgatttcacggaactggcggcgcacctcatccaccatgtgaccggcagcacggccaacagcattcattgtcaatccgcagaaaaggaatgccatcatactgcccaggaacatacccgaaagaaccttcggattcatcaatgtcacatcataatgatgcataaaatcgaagaaagtggcatcctgaagcgccacggcatccccatgaggaagcgttaaatcagtggttcccaaacgagtcagcccgatacggatttcttcaatataagaagcaagcagggcaagtcccgtaagtgcagccgaaccaatagcaaaaccctttccggtagcggcagtagtattacccaaagagtcgagagcatccgtacgtttacgtacttccgcacccagaccggacatttcagcatttccgcccgcattatcagcaatagggccgtaagcatccgtagcaagcgtgatgcccagggtggaaagcatacctacggcagcaataccgataccgtaaagtcccatacctacattattgaaatcgaaccctgatgcaaacaggtaggaagcaataataccgactaccacagcaatcacaggaatcgcagtagacagcatacccaaaccgataccggagataatcaccgttgccgggccagtctttccgctttcgctcaacttctgagtaggacgataggattgtgaggtatagtattccgtagaacgtccgatgatgatgccgactaccagaccgactataacggcacaagatatccacatccagttatcaagtttcaatagccaaagaataaagaaagtagccacaacaatcagcactgaactcaggttcgtaccgaaagccaacgaagcgagcaggtctttcatcttcgcattctccttggtacgtactgcgaatataccgataatagaaagaagaatacctacggccgcaatcagcattggagctataacagctttgaactgcatggccgtatctcccgtatgaataaaggcagcagcacccagagcggcagttgccaggatagagccacaatagctttcatagagatctgcacccataccagccacatcacctacgttgtcacctacattatcggcaatcgttgcagggttacgcgggtcatcttcgggaataccggcctcaaccttacctaccaggtcggcgcctacatcggcagctttcgtataaatacctccacctacacgggcaaagagcgcttgtgtggaagcacccattccaaaagtaagcatggtggtagtgataatgcagagtttatgagtcggagtcaaaacatcttccggtataaccgcattcaataacagataccagaaagaaatatcgagcaagcccaaacccactacgaccagtcccattaccgcaccgctacggaaagcaacacgcaatcccgcattcagtgagctacgggcagcatttgctgtgcgtgccgaagcatacgttgccgtcttcataccgaggaatccggagaggccggagaagaaaccgcccgtcaggaaagcaatcggtacccaacgattctgtacatcgaaaccataagccataatagcgaaaaggatcacaagtcccagaaatacccagccaactatcttatactgttgtttcagataagacatcgcgcctttacgcacagcggcggcaatctttatcatttgcggagtaccctcactctctttcatcatttgcttatggaaataataagcaaagcagagagctaaaacggaagcggccggaatcagccagaaaagcaaactgtccatggtgttaatcgtattaaaaggttgattgaaagtctaaaagtattgatttgaaacgaaataagcaaaggaataaaagaaaaatcaactcattctattaaatttgcaggcaaaaaccgtacccgattgagcacccatgttgtagtataagtaaaatcaataaaaacaaaggaataatgaaacgcacagattttacttttagaaaggcatggatgatatacacagtatattttcttctactctttaccccaaccgcaaatgcacagcaaacagccagcctggttagcctggaactaaaaaacgaaaagctgtctgccgcactgaaacagatagagaagatgggcggcaagaatatcctttttgcctatgaagagacggagaattatcacgtaacagcaagtatccgtaaacagacgcaagacgaagccatccgcacagtactgaaaggaaaacctttcaactgtatcgaacgtactgattacttcgtgattcagcggaagggaaaagatggcaagactacccaagtgcgcggaaccatatacggagaccgaaatgaaccgttagcgtatgccaacgtcatcctgctggcagcagctgattccgcctttattacaggatgcgtcacagcggaagacggtagctttatcctacccggcaacaatgaaaaaaaacatttgctgaaagtaacctacataggctatcaacccttgacgcttccttgccagccggaaaatgacattcacctgcaaccagacgcacaaatgctgaaagaagtgaccgttactgcctctcgtccgctgatggaacgcaagaatggcgctttcgttgccaacgtagcagggacaccgctttctatgctgggctctgcaagcgatatgatcggtcacctcccttttgtcaccggctcggacggtaactataccgttatcggacgaggcaaaccggagatctacatcaatggccgaaaagtacgcgacacctccgaactaaaccaacttcaggctaacgaaatactctccgctgagattgtaaccacgcccggagcacgttattcctccaacgtgtcatccgttatccggctacgtaccatccgcaagcgcgggcaaggtttaagtgccaatgcctacgcagactatactcaaggacactcagcaaaaggcaaacaaggcgcctccctaaattatcgtaccggcggactggacatctttgtcaaagggcacttcaatgagtcggacacatactccaccagtcatacccaactgcaactgaacacttcctccgaatggaaaagcatatctgacaacgtcaatcgtgcacatgatgcaaacttcaatggcgaagtaggtttcaactacgaaccggatgaccatcagtctttcggtatacgctatgtacccaaaaccggactgggcgatcaggagctttattcgcaaggtgaaaccgtgatgctgcgggacggagaagaggtagatcgtcttacatccgactcacacggtcgcaagcacaccaactggaatcataccgtgaatggctattataacggtactttcggaaaatggaacatcgacttcaatgccgactacctctacggtcgctccggaggtgggcagaaggtagacaacaatggtgaaacagatgcctcatccgacagtgaagtaaaaaaccgcctgtatgccgctaaactggtgattacggcaccgcttggtcaaggcaaactctctttcggtactgaagaaactttcaccgagcgccacgacatcttcaaacaaagcggtttctccaatgatgccgataaccgcatcaaacagtccatcgcctctgcctttgccgattattccatagaattgggacagtttgacctcatggcaggattacgctatgaatatcaaaagacggattattacgaatcagatatctataaagaagagaaaagccctgcttatcatgacctgattcccgtagcgggcattttctacaaaaaggatgactggagtatcggtctgtcttatcgcatgaaaaagcataatcccagctacagtatgctgtccagtaccatcagttatcaaagcaagtatcaataccacaacggaaatcctgaactggaaccacaaaagcataacctcttctcattggaagggggctggaaatggatcaatgccagtttgtacttcaaccatgtacgaaacatgtacaccacttatgcaaaaccatacgacgatacaatgcatcccggtgtagtattgtggacaatggcaagcatacccaactcttacgcatacggaggagccgtggtattctccccaaagttcggctggtggcaaccgcaatttacggccagcctgttctggttccagtccaacgcccgttcactgaatattcagcccctttggaatgaggtgcaaccggatttcactctgaataacagttttacattgcctcgtggctggtttctcaatataaaaggaagactggcatttggtgcaaagcaaagctatgccatcaaaaaaacagaagggactgtagatgcgcaacttaccaaatctttcctgaaagaccgtgcgttgcgcgtctcgctggtagcgaatgatatatttcgtacaggtacctatcactttcgtgtatatggcgaccgtacctacaacgagtttgaaaattatgccgacaaacaacgtttcggtatacgcctcaactatcagttcaatgccactaagaataaatataaaggtaaaggtgccggagaaagtgaaaaaggacgtctttaagcattgcagtaaacgagggataaaggataatccttacctttgcggactaaaaaaagaatcggagaatgtccttgtttcataaaaaagacacaaaaagagaagttttcggacagatgttcacggagctatatccccgtctggtgcgctacgccacccaactattgggcgacggagaagaagcccgtgatattgtgggtagtgtgatggagcaggcgtggaaacaattcgaaaagctggaaccggaaaaccggggagcctggctttacactgccgtacgtaacgcctgccttaaccgtctgaagcatctgcaagtagaagccaccaacctggaagcgctgcgcgaagccactcgtatggatgtagcgaccgactaccgggaacatgaacgactactacaacaagcggaaagcattgcccgcaacctaccagaaccaacctgcacggtattgcgactctgctattatgaacataaaacctatcgggaagtagccgaacagcttggcatcagtcccgacaccgtaaagaaacatatatccaaagctttgcgtaccttgcgcgaagctatgaccctgaaaggaggaaaccgatgatggaagagaaaaaagaaaatgatttcaagatggatactgaagacctcagattactgaatgccttcggagaagcgctcggagacttaccttcggaagaagaaacccgcgcggcatggaatgcttttgcctcccggcaagatgctcaaaaacgcagacgcatcatacagatgtggacttccggcattgcagctgccatcgtagtgctggtagtgcttatcgtgccccgtattaccaacgaagacacgattcaagatattgaaatctttgcggccctggatgtccccgaagcaatcatcacctcagagagcaatggtaggattactctttcaactcccccagccactaccacgcaaatcatcctggacgatggtacacaggttacgctcagcgccaattcccgcctggaatatcctaaacaattcccggcagagggaacccgtgaagtccatctgacaggagaagcacgtttcgaagtgacaaaagatagtgcacgtcctttcattgtttcttccggtaagatgcagacacaggtattgggcacggtattcgatgtaaatgcctatccgggaaaagtagcggcagttactttatttcaggggcgcgtccgcgtcagcgacgagaaacaaacacagcagaaagacatattgcccggacagcaagctatattgtctgaagataatggtttcaccatatccgaagcacaactcaccgcaacggaaggatggaccaaaggagagttcagcttcgatgatgccgaactggcggagattatgaagtctgtaggcacatggtataacaccagtatcatctttcattcgcccgacttgctgaaacaacgcatccatttccgcttcccgcgaacaacttctttggaagaagtagtgcaagcgctcaatgatctgagaatagccaaactggaacaaaaaaagggaaaagtaatcatcagcgattattctcccaagcattgatacgcagaggaagagcttttcggctcttccccctgtatttattattctactgtcacagccgtaccacaagcggttaccatcagcatactaccgcttccacctacagtttcatagtccaaatccacgccaatcacagcattggctccgagagctctggcgtgttcctgcatttcacgcagggcgatatctttcgcttcgcgcagcacttcctcataagagccgctacgtccgcccactacatcgcggatactggcaaaaaagtcacggaatacattggcaccgataatcgtctcgcctgaaacgataccgtaatagcgggtgatacgtccaccctcgatagttggtgttgttgttactaacataatctttctctatttatttaagttacttgcaccctattagacgcacggatagggcgaaaagttgcaatggtgagagcttttatacctcttcattataataaaaaaacaaaaaagagagtacctatatatgagcaaagtcagcatttatctatctttgtgccgaagaaatggaaacaaagcattttatatttaaaataatgatgtatctggtcgtagtgctttttgctctgcaaccagaagattataattccttttccgaaaacgaacctccctttctttgcatcgaacaaaatgagcatcattcgcctgaagagtttaacgatgaagctgttatctcacgtacactttctttaaaccgtgcgcgtaagctctgcgcagagactacgactacttatactttctctactgagaacactaatttatatcaatatagtgacggtagccaaccgtacaacctcaggagcgtatattcacccgaacgctctctactttgtatatatcggctttagcacaagtccttctattaccgtatttttatattctatccgggacgaatcatacattcgttccgctatgtctaattaataaacttatatatgggacttgttttattatatttaaccattgcattatcattatcatttttatgctccattcttgaagcagttttattatctaccccaatgtcgtacatttccaccaaagagaaaacacacgggaaaagcgctatcttattaaagaagttcaaacaagacatcgaccggcctattgctgccatattatccttgaacaccattgcccacaccgtgggtgctgccggtgtaggtgccgaagcagtaaagatattcggagaagcttacttcggtgtaatctccgccatactgactattttaatcctcgttctctcagagatcattcctaaaacgataggcgcctgctactggcgcacactggcacttccatcagcccgtatcattaatttccttattatcatctgttatcccctggtgtggttgtccgagctgattacccgtctgttttcttccggcaaacaagaattatccgtaagccgcgaagaggtttcggctatgatttccatcggggtagaagaaggtgttttccagatgaaagaaaacaagatgatacaaaacctcattaaactggataaagtaaaatcacaatccattatgactcctcgtactgtagtagcaacagctcccgaaagtatgtctctgaaagagttctatcaggatggaaagtataagttttactctcgtattccaatttataatgatagcgaagattatatcacaggatatgtgttgcggcagactgtactcgaaaagttagcagaagacagattcgatatgtgtctgaaggatgtggcccgccctatcctttccttcccagaaaatagttctgtttccacggtctgggaacagatgcttgaaaaaaaagagcatatttcaatcttgattgatgaatatggctgcttctggggaattgtcacaatggaggatattatcgaaacagccttaggttttgagattgtggatgaaaaagactccgtaacggatatgcagaagctggcacgggataagtggcagaagaagctggcggaaacgaagattaggaaggtgtgtcataatgcagtactatctcaattctcctcctcccgggaggaggagtacccgtagggggaggtggtaggcgaatgcgtaagtctttagtatttaaagttatatgtttgtctaccaccccgccctttgggcacccctcctcccgggaggaggggagcttaagttactttccagttttgacacaccttcctaactagaacatcttgctgacacgttcgatacctgccaccaaaacatcgatttcttctttcgtattatagattccaaaggaagcacgcactgttccttctatgccgaggcgttgcatcagcggttgggcgcaatggtgtcctgtacgtacggcaataccgagacgatcgagcaatgtgcccatatcgaagtgatgaatatcacccacaaggaaagagatgacactccctttctcagcagcttcaccaaagatgcgcataccagggattgttttcagtcgctgtgtggcatattccgtcaattcatgctcataagcggcaatcttatccatgccaatggcagaaacataatcgagagctttcgccagtcccgtagtaccgatatagtcaggagtaccagcttcgaacttaaacggcaattcattgaaggtagtacgttcaaaagatacatgctttatcatctcaccgccgccttgataaggaggtaacttattcagccattcttccttaccataaagtacgcccacaccggtaggcccatacactttatgaccggagaatacaaggaaatcagcgtccagatctttcacatccactgccatgtgaggaatggattgcgccgcatctaccaggaaaggtacatcatgattatgggcaatcttaatcatttccttgataggattgaccgtacccaaaacattggacacatgtaccacgctcacaatcttcgttcggtcagtgaaaagcttctcgtattcatccatcagaagttcgccgcgatcgttcatcggaataactttcagattgatgcatttccgttcagccagcagttgccaggggacaatgttactatgatgttccattacggaaacaatcacttcatcacccggatgcaggaatgcttcgccgaagctggaggctaacagattaatgctttccgtagttccccttgtaaatacgatttcatttatagaaccggcattgataaactttcgcactgtctctcgacttgcctcgtgcagttccgttgcctgttgcgacagaaagtgtacaccacgatgcacattggcattgacagaataatattcatccgttatggcatccaccacacaacgtggcttctgtgtcgttgccccattatccaaatagaccaatggtttgccgtacacttcacgggatagtatcggaaaatcggctcttatcttttgaatatcatacatgttgtttaggtattaatatattctcacttgcatatcgcacagccctggcacttattcagttcaccacggaaacgtttctcaaccaagagatgtaagcgatctttcaatgcatccagacggatggtatcgattacttcgttcacgaaggcaaacatcagcaataagcgggcttcacgtgccggaataccgcgctggcgcatatagaaaagtgcattttcgtccaactggccaacggtagcgccatgactacactttacatcatcggcataaatttccagttgcggttgcgtatacatacgtgcctcacgggtagcgcaaaggttccggttcgtttgttgcgaattggtatgttgcgcatccgggcgcactaataccaaaccggcaaatgcaccgactgactggtcatcgagcacatacttgaaaagttcattgctcgtgcagttaggtacggcatgatcgatacttgtattgttgtctacatgctgattcttatctgcaatggccataccgcaaaggttgatttcggcaccttcacctgccagcaatacttcggtggtgttgcgggaagtgccgttatgcaaggtcatgccattcagcaatacattactgttggcttcctgcttcacatacatattgctgatacgtacggtacttgtatgcgtttcttccagttcgtaaaggtcaaagacagcattctcaccgacgaatacttctatcacctgggttgccaggaaattcacggcatccatggcatgatcacacaccagcatacgcgcctgtgcgccatcttccaatacaatcaatacccggcggttcaccaggaagttcacgtcaccacgcaggatgtttaccaactgaatgggacgttccaaagcgacgttcttaggtatatacaacagcacaccgtcttgtgcaaaagcggtgttgaatgctgtcactccgtcttttgaagtatctgccagcttgccatagtacttctttaccaattccggatgcttcgccgccatctccttcaaactaccgaagataactccttcgggcagatgtgaagcaggtagcgctttattgtaaaaagcatcgttcactacaaagtacagagaagtgctcatattgggtacgtcacatttgaatacctcatagggatttaccggaatatccaggcggttcaggttcaacccatagtccggttcaaagaacttgctgacatcggtatatttatatttctcctgtttgcgggtaggaaagccaagccgctcaaagtcggcaaacgcagtcgcacgaggggtattcatcacctcggtgctgtgttggcatatcatcgcttccgtctgggagaaaagatctatgtattgttgttctgcattcatatacgtttatattttatttcttagacacggataacgcggatgacgcggattcactattattctgtagacgttctctatagtaatgggaaaaaacctttctactaatttctggtttgggaccaaagtttaataataatcccacttctatatctgttgctttcaaataattgaccaattgcaattcatgttctttagatagtcgggtgaccgcttttaattctaaaataacagaattatatacaattatatcagcttcataataaccgactacttcatccttataataaacatttattttcggatgtgctacacagggaatatcacgtctcaacaactccctatataatgcattctgatatacattttcaataaacccatacccaagttcattatacacatcataaaatgcatttataatagcatcagttttatccgcctgtgtcaaactcataatacactaataaaaaatccgcgtcatccgtgccatccgcgtctaaaaaatgtaattactctcctagttccttcttaatccagtcataccccttctcttccagttccagagccaattccggtcccgcagtcttcacgatacgacctttgtaaagcacatgtacaacgtcaggtttgatataatccagtaagcgttggtagtgggtgatgacaatggtactgttctccggtgttttcaacttgttcacaccttcggctacgatacgcaaagcatcgatatccagcccggaatccgtttcatccagaatacttaatttcggttccagcatcgccatctggaagatttcattccgcttcttctctccaccggagaaaccttcattcaccgaacggttagccagtttattgtccagttccacaatggcacgcttttcacgcatcaatttcaggaactcgcttgcactgagagcgggcagatgattgtatttacgttgctcattcaccgctgcacgcataaagttaaccatactcacacccggaatttctaccggatactggaagctgagaaagataccctcgtgactacggtcttccggtgaaaagtccaacaggttcttaccgcagaaagtcacgcttcccttcgtcacctcaaaggcaggattacctaccaatacagccgaaagagtactctttccggaaccgttcggtcccataatagcatgcacctcacctgcttttaccgacaggttgatgcctttcaatatctctttgccatttacactggcatgcaggtcttttatctctaacatctttatatttactattagactatttacaatttactatttaatgtcacttctccactattcactattactaccgaccttttacttatctaccattcatctgccgattgtgcagcaaaatagtaaatagtaaatcgtctaatagtaaatcaccctacgctgccttccagcgaaatagccaacaacttctgagcctctaccgcaaactccataggcagcttattaagcacttccttagcataaccgttcacaatcagccctactgcatcctccgtagaaattccacgctggttgcaatagaagatctggtcttcattgatcttgctggtagtcgcctcatgctccacaaccgccgtctcattatggatatccatatacgggaaggtatgcgcaccacatttatcacccagcaacaaagaatcgcactgactatagttacgcgcattgtccgccttttgagctacacgcaccagaccacggtaagagttctcactatgtccggcagagatacctttgctgacaatggtactactggtattcttacccagatgaatcatcttcgtacccgtatccgcctgttggtagttattcgtcaccgccacactgtagaattcagccgaggaattatctccagtcaaaatgcaggaagggtatttccacgtaatagctgatcccgtctccacttgtgtccaggaaagtttactgttcgcacctttgcagttaccacgtttcgtaacaaagttataaacaccacctttaccttcggcatcacccggataccagttctgtacggtactgtacttcacctccgcacgctcgtgcaccacaatctccacaatagcggcatgcaactggttctcatcgcgcatcggagccgtacaaccttccagataggaaacatacgaatcatcatccgccacaatcagtgtccgctcaaactgacctgtattacgcgcattgatacggaaatacgtggacaactccatcgggcagcgtactcctttcgggatatatacaaacgaaccgtcggagaataccgccgagttcagtgcggcaaagaagttatcacggtatcccactacggaaccaagatacttctgcaccaaatccggatgctcacgtacggcttcactgatggaacagaaaataattcctttctccatcaacgtttccttaaacgtagttttcacagatacggagtccatcacggcatccactgccatgccactcaacgccatctgttcttccaaggggatgcccagcttattgaaggtttttatcaactctgggtctacttcatccatgctcttaggcgcgtctttcttcttcgccaacggatcagcatagtaggaaatagcctgataatctatctcaggaatacggagatgtgcccatgtaggcatctccatcgtcaaccagtgacgatatgctttcagacggaactccaacagccattccggctcgttcttcttcgcagagatcagccgtacaacatcttcattcagcccacgctcaatgacttccgtatgtacatcggtggtgaagccgtacttgtacttctcctgcgttagttcctttacatatttattgggttcttcgggttgcattatgtattaagtatatattgttctgtaacttcttttgcagccgggaaaaatattcccgcgaacgactctataggataatataacacggattcctccttcattgttctatcaatcatcgtattatccgagtcgataaactcgacaacacagataagcagactcaccagcagcaaaaacttcaacgcgcccagtccggcacccagccatcggttcagccaaccgagcgagactgcttccatcgccttcgtcagcaaagccgctaccagcaggaacaacaacggaaccactatccaaataacaacaaacgccaatatctgggcaaacgtcatggagtccgttatcttagaaaagactctctccgctaccgacacatacagtgcttttgcagccagcaatccgacaatcaatccgaggatggatgccagttgcttgatgaagccttttataaaaccgatgactgctcccgcaccaatcaccactaataagatgatatctattattgtcataactatatctaaaaaagacacggattacacggataagcacggtttttcttttaaaccaatccgtgaaatccgtgtaatccgtgtctaaaagattatttcgcttacagagtctgttttacttctatttcttcgtaagattcgatcatatcgcctaccttgatatcgttgcagttcgtcaggctgataccgcactcaaagttggtacctacttccttcacgtcgtctttgaaacgtttcaaagcattgatagaaccggtaaagattacgataccgtcgcggatcaaacgggccttgtcgctgcgtttcacctttccggtcttcactaccgcaccggctacgagacctaccttggtgatattgaacacctcgcgtacctcgatggttgcagttacctgctccttcacctgcggtgccaacataccttccatagcggccttcacctcttcgatagcatcgtaaatcactgagtacttgcggatatccacaccttcattctctgccatctttgcagcggcattcgacggacgtacctggaagccgatgatgatagcatccgaagcggcagccaatgaaacatcggattcggagattgctccaacgcctttgtggattacatttacctgtacctgctctgtagacagcttgatcagtgaatcgctcaacgcctcaacagaaccgtccacgtcacccttaacgataacattcagttcatggaagtcacccagtgccagacgacggccaacttcatccaaagtaagcatcttctgagtacgcagaccttgttcacgttgcaactgttcacgcttgttagcgatttcacgtgcttcctgttccgtatcgattacgtggaacgtatcaccggcagcaggtgcaccgttcaatcccagaatcaataccggctcagacggtccggcctctttcaggcgttggttacgttcattgaacatagctttcaccttaccatacgctgtacctgccagtacaatgtctcccacctgaagtgtaccatttgataccagcatggtagctacgtaaccacgtcctttgtccaacgaagactcgatgatggaacctgttgccttacggttcgggtttgctttcagatcaagcatttctgcttccagcaatactttctccaacagttctttcacacccaagcctttcttggccgagatatcttgcgattgatatttgccaccccattcttcaacgagatagttcatacttgccagctcttccttaatcttgtcagcgttggcagtcggtttatcaatcttgttaattgcgaatacgataggtacaccggcagccatagcatggttgatagcttccttcgtttgcggcatcacgttatcatcggcagcgacaataatgataaccacgtccgtcaccttcgcaccacgggcacgcatagcggtaaacgcctcatgacccggtgtatcgaggaacgtaatctcacgtccgtcttccagtttcacgttgtaagcaccgatgtgctgcgtgataccaccggcttcaccggcaataacgttcgccttacggatatagtcgagcaatgatgtcttaccgtggtctacgtgacccatgacggtaacaatcggcgcgcgcggttccagatcctcttcagaatcctcctcctctacaatggcctgtgccacttcggcactgacatattcagtcttgtatccgaactcttccgccaccagattgatggtttcagcatccagacgctggttgatagacaccatgataccgatactcatgcaagtagcgatgacctgcgtcacggaaacatccatcatgcttgccaactcgttggcagtcacgaattccgttatcttcagcactctgctgtccgccatttcgcggtcttcctgctcctgcatacggctgttcgctatatcgcgcttgtccttacggtatttggaagtcttgctcttacctttggaagtgaggcgtgccaaggtttcttttacctgcttagctacgtcttcctcgctaacctcctgcttgatgaccggtttcttgaaacgatccctgttattgttgttacggttgttcttgttgccaccttggtgattattaccaccaccggcaccttgctgaccgccgccggcatgaggtcctttacctccaccaccacggttgtcgcctccacgctggaagttggatgcattgttgatatccaccttctccttattattattaatgcggagacgtttcttcttgttggcgttggcatcggcatctttctccttgccatccttcgctttggtgtcttcgcggcggatttctttgatgatcgcctctttcatcagcttcttctgatcctgacgaagcttctccttctcttcgcgttccttacgtttctcctctttggatttcttcttagggcgcgtagactggttcaatgtcgccaaatcaatctgaccgatgatattgatcttagaaacaaactccggcttgtgaagtgtgaagatttccgcttcaccactctttgcaggcgcttcttctgccacggcaggtttcgcctcctcccggacaggtgccgcgggagcaggtgtttcttttttcactacttctttcgctactaccggagcggggttgggtgcaggtttttctgcaacgactgctggcttcggttcttctttcaccacaggagccggttcgggagccggagccggcttcggttcgggtttcggttcgggctttaattccggtctgggttccggcttcggttccggtctgaactcaggcttcggttccggtttgggctgcggtttaggctcttcctttaccacaggcgcagatgtttccactttcttttcttccactttttctactaccggtttccggttcagtttatccaagtctatttttccgacaggtttaaacttcggacgtgcatcttcgggtacaacagtctttatttcttcaactttcggtttctccgtagtctcagcttcgtaaccatcgatagataccgatgctttgttacggtctttattctgccgttcctgaatgaaacgttccgattcaagtctaagattcttatctgtactgaactctttcacgagcaaggcatattgctcctcgttaatttttgtgttggggtttgcctcaacggcaaatcctttcttctgcaagaactcaacgaccgttgaaattcctacattcaaatctcttgttactttatttaaccttatcgtcatactaaaaaattaatgaataatgtggagaaagaagttagtgcaaacagaaacagatgtcgacagacattttattctgcctcgggctctgcctcaggggcaacctcgggctctgtctcaggcacaacctcaggtgccggttccaattcaggttcgccttcttcaaactccaaacttaaaatgcgtaatacctcgtccaccgtttcttcttccaagtcggtcttttcaatcaacaactcgcgcggagcgttcagcacggccttcgctgtatcgataccaatcgacttgatggcatcaatcacccaaccgtcgatttcgtctctgaactcatccagatagatatcttcatcctcaacagcctgatccaactcacggaatacgtcaatggtgtactcggtcaacatactggcaagtttgatattcaaaccgcctttaccaatagccagcgaaacctcttcaggcctcagaaatacttctgccttacgttcttcttcattcagacgaatagaagatatcttcgcggggctgagggcacgctgaataaacaactggatattggacgtatagttgattacgtcaatattctcgttgcgcaactcacgaacaatgccatgaatacggctaccctttacacctacgcaggcacctaccgggtcgatacggtcgtcgtacgactcaacggcaatcttggcacgctcaccggggatacgggcaatcttcttaatggtaatcagtccgtcattgatttcgggcacttccatctcgaacagacgctgcaggaatacaggcgatgtacgagaaaggataatcttcggattgttattcttgttgtccacacgggccaccacggcacgcgccgtttctcccttgcgatagaaatcgctcggaatctgttccgtcttgggcagcagcaattcgtttccttcatcatcgagcagcagcatttccttcttccatatctggtatacttccgcattgatgatattgcccaccttatcaatatatttattatagatactgtctttttccagttccaaaattttagaggccaacgtctgacgcaggttcaggatggcacgtcgtccgaagttcgcgaagattacttcatccgtcacttcctcgcccacttcataagaagcatctattttctgtgcttccgataatgcaatctgcaagttcggattttccaggtcttcatccgccactacttcacggttgcgccatatttcgaagtcgcccttgtccgggttcacaattacgtcgtaattctcatcggtgccgaacatcttcgcgatcacactacggaacgactcttcgagcacgctcaccatggtggttctatcgatatttttcagttccttaaattccgaaaatgtatctatcaggctgatagtttctactttcttggccatagtcttatttaaaactgattaagtatttagtatattttatttcatcatacgcaagcatttcgtcttcctgcaccagctggggacgcttggctccttcgggtttcactttcttctctacagttacagtgaaatgctgttcatcggctgccttcaacacgccgcacaacttgcgtccatcttttctcagcacttccacttcttttccgatgtggttggtgtactgttgcaacactttaaatggctgtccgataccagcagaacctacctccaactcataatcctcatcctcacggttcaacttggattcgatgtatcggctcaactccacacaatcttcaatccaaaccccttctttgtggtcaatttccaccacaatcttgtcgtccgggctgatagctacttccaccagaaagtactcttttccgtccagccactcgtcaacaatctgacaaacagttttcttttctaccattgattaactatataagaacaaaaaaaggagcttaattgcccctccacctttcatccattgcggttgcaaagatataaataatctattcgactacaaaatattagagaaaaaaagaatgatttaacgctcctgaaagaagaaagtaatgcaaatgacttctgtaaaaccgcttcgatatggcaaggtcgattctgacattttgtattttatgcataaggagaatgccgtatatccgcccttccgccggtctgaatggaaatacgcaagtaaaaaagtgtatccggcagactgacagagggatacataaatacggacaatgctgaaaaataaaacagacgcggtttggcaaccataaactgttggtttgcattggatatatggatcgtaggcgttccatatatagatggcaagtattagatatatagatcgtaagcgttagatatatagatagcagacattagatatatagttttgaggcgtaagatgcatagttatcttgcataaagtctgtataacgactgtatattattcaatattccgtatttatattcctttagaagacagaacaagatgctatttccactcttttataaaaacggagcgtaagtaatacaggctttttactatctttctgcatacaagaaagccaatagttcgaaataagggaactattggctctatccataggaggtaaaatgtacctgaacttttatatatttttatttattcggcgtatcccatttcctggtatccgtacaagtaatattcaaagtttgattacccgtctgtatgcggaagtcgcctttttccagaatccatttgccatcataacccacgaaagcaaggtcggagcctttcactttcagcgtaacggttttcgtttctcccggttgcagttctactttctcgaaagcacgcaggcggcgaatatcaggagtcagggaagcaatcagatcgctactgaacagcagaacgctttccttgccgatacggttaccggtgttcttcacatcaacggtgaaagtaagtacatcgtcagccgtaaagttggttttatccgctttgagattgctgtaagcataggtagtgtagctcaatccgtaaccaaatgcccattgcacggacatcacggcatcgtaatcataagcacccgacatcttttcaaggtcttcgcacggcttgtagtcgtaagtgaacaatgaattgatttccttcggataagtgtaaggcatcttaccgctgaagttggcgtctcctgccacgaggtttgccaaagcatcgcctccatagttacccggaagcatggtgttgataacagcctttgccaacggttctatttcgttgacgatgcgcggacggccttcgttcagaaccaaaacaaccggctttccggtggcagccaatgctttcaccagattgagttggctttcggagaggaagaggttgttcaggttacccggagtttcgcaataggagttctcacccacacaagcgatgatataatccgcattggcggcagcagctacggctttatctatttccggagcattctcttcccaccatgcgccaccttccttataagtgacacccggctcatagatgatattggaagcaccgaacttctgagtgaacgattcaagaatggtgttataatccgccgctaattcatccgccctgtgtccttgccaagtgtaagaccaaccaccgttgagcgtacgcatggagttggcattaggacctgtaatcagcagttttttatctttgggtaacggcaagatgtgatcggtattcttcaataagaccagagactcttcggcagcctgcaaagcagccgcagcatgctctttacctccgaacagggggaaatccttgtgattataagcaggtgtttcgaacaagcccaagcgatacttcatgcgcagcacgcggcgtacagcatcgtcaatgcggctcatcggcacttcgccttcttccaccaattctttcaggtatgtacagaaactccattcataaggcaccatcgacatatcgataccggcattgatagctatcttgatagcctctttcttgctgcctgcaatcttatcgcgggtgtagaggttattgatatccgcccagtcggtcacaatcatgccgtcccagttcaagtcctctttcagccactcggtcagcaattcgtagttggcatggaaaggaagcccgttgttcatggcggagttcaccataacagacaaagcacctgccttgataccttcgaggaacggagcgaaatgtttctcgcgcatatcctgcacggtgatggacgaaggggtacggtctttaccggaaacaggcacaccataacccatataatgcttgatgcaggcggccacttgttgctttcctatatgattaggatcactgccctggaaaccgaatacggcttcgcgccccatttcggcattcacgtagcaatcttcgccgtagttctcccaatgacggggccagcgggcgtcacgtgccaggtcgagcaccggagcataggtccaggggatacttccggccttggtttcataagcggagatgcgggcaccttcacgcaccagttcgcggttgaaggtagctgccatattgatgccctgagggaagaaagttccgcccaatgtataagttgttccgtgtatctggtctacaccataaatacaaggaatacccatgactttcatcgatttgtcctgtatcttccggatgatttcttcccacttctctttggattgggcaacaccctggggtacattcaggatagagccgactttgtatttgccgataacggtatccagcaaagcatcgtctatctgaaattcttgggtcgaattatcacgtttggtaatgacgtcaatggtaagctcggtcatctgcccaatcttctcttcaagggtcatcttcttgagcaaggcttctaccttcttttctattttcccgtctcttgggatggcaggagccactgtagtttgcgccgtagcggtcaacatcagcccggagagggctgcggataagattaattttctattcatggtattgtttttgggttttcggaggcaaagatatgtcaaaagttaccacagaccacacagattcacacagattatttatatatattgtattcaatccgtgtcaatctgcgtaatctgtggtgataagtttcttacctgaacaacatcggaacgaactccgtcagataaatacgccagttcttccagatatgtccttcgtccgattcataataggtatatttatatcccttttcatccagcagtttacggtattcctcattggctttgtagaggaaatccgtcttaccgatggcaatccagtaaagggcgggatttttgtcaaactgcactttcagttttccttccatattctcgtatatcggtgaagacacctctttattaggcataatggcagcagaaaacagtccgatataattaaacatatcaggatattgcttggaaatatgcaaagaatggaaaccacccatagacaaaccggcaatggcacgaccggatttactctttatcgtacggtagtttttatcgatgaacttcacgatctcgggaaacgcctgttcataagatccctccattgtcttgggtaactgcattgtcgggggaaccattccacgggatgactctccaggggcagcctcctgtgaagcattgccgttcggcattactacaatcataggctttgccttcccttgtgcaatcaggttgtccagtatctgtgcagtacggcccagggaaatccatgcctcttcatcaccacccattccatgaaggaggtaaagcacgggatagcgcttgccgctggtttcataaccggcaggggtatagaccgtcatacgacgttccagaccaagcgccggactatcataccatatccgggagacggttccgtgaggcaccggattgactttataaaaatcggcacgatcaccgcctatgataaatacgttggttaaggtggacacatcacggatcaggtagacattggcgggatcgttcatccgcaagccatctactatgaaagagtagctgtaaagctccggtttcagaggttcgggagtagtatattcccatacaccctcctgcccttccttcagatccacaattccgggagcctcgaacttagcattcttctgtacaggcaggaaatctcctgtaagctgtactctcaccgcttttggtgctttgaagcggaaggttacggtattgttgtcatgaatctcgggagataccacgggagcagttccccaaagggcttgttgtgcaaacatcgtcacaccaaccagcaaggcaacggttaaagctgttaatcttttcataagtatgtatatatcaatgttcacgaatatagtttataatcaggaaacaggcaggttcgagtactgtgccatgattgaagccttgcaactcatgcagagtcaccttcttattgccgatattcttcgctacggaagcgaataaagcgttctcttcccatcgatctgccatttccagattgcggtctccggttatcagtacgacaggaggggtatctttacgcacacggttcaccggggcatattcatctataataggaataccgttcggtaacccgcgttctttacgaatcgtgaaatgggtcaccgtctgtccgctgacgggaagataagccgccactttatcggcatccgcaccacaagcttccatgtacttcttatccatagccaatatcagtgcaaggtagccgcctgcggaatgtccggaaacaaatatcttgtctttactgccgccatattcttctatatggttgaatgtccatgccacggcagccgcagcatcttcaatataagcgggattcttggccttgggacttagacggtagttcaccgccaccactgcaaagcctctgttcatcagttcctgggggatgtgttttccaccgccttccagaccaccgccatgaaaccatacgatagtgggaaaatcttttttgtccaccggatagtagacatccaatttgcaacgttccttccggtaagcgtcagtctcggacttggcaatatacggcaggtcttttacggttttatatacttcctgcgcatgcagggttaacatacagaataatagcaacagaagtgtcactttccttttcatggcatatttgtttaaaggtttgtagctgcaatattaggcaaataattttaaagagcggcttcttaattgttgaaaagattgtctgtacgttcaattttaatcattacatttgcgcaagcattcaatttcttacaattatggcacaccacttgaataccaacaaacagtttatggtaggcaacggcatcctggcctttgcagttattttcgttgtcgtcatcttcatttacatgagcctgcgcctgcagaagcagaaagatgaagaccggaactttatcgaaacgtacaccatcaccctggaaaaaggatttataggagattccctgtcactaatgattaatgacagcgtgctggtgaataagaaaataaccgaagaaccattcagtatggatgtgaaacgttttgccgaacagagcgcattgttgattgtggataaagcaacggatcaactatccctgtttgaactgagtgaaaaaggtggtaactaccggtttgaaaaagagaatggggaagtaaaacagttggcgcaaaaataattcaccacagagtagcacagagtctcacagagttttatttcaatagattaaactctgtgagactctgtgctactctgtggtgagaacttatttcacctgaaaatagaacttatgcttcagtgattttcccggcatcttaaatgtcagttccacaaagttctcttcatcttccagacagtcttcgctattataagttatcagaatgtcttcgccacatggcacagctttcagttgggaagcgcagttagaagtaagtttcggcatagcagccgtagttatcttctttccttttataaataaggagactatataagcatccttgccgtccgactttccttcggcagtgataaaggttggcaacttccgatagttctgaacgacaccttccgcccattcacggcgtgtcttatcgaagaaatattctacggcgggacgcatttttgtgatgcactggtctatttcttccaccgaagagatatcagaaatatgctcttccatcttctttatcaagtcctccatcgcacggtcctgctcttcaaactgacggaccaacgctttatgttcgctttcagggaaggggtagcgtatcgcataagcgtacgttattttaccggacttcttatcacggcgtttctcccaatacgacccatcgactttagaaagtgagatccccttgataaaaggcaaagaagctgcacgggtagaaccttcggccatatactgatcgacaaactccgtgatacggtcaccgttaccggaagtctgtttcactatatgcgaatccgagaactcgacattctgtgccacagcttgaataatctgtctcttcacactttccaggcattgctgacgcgcctcttccatcgaaccagtctcagcagaagccacgatatagccggactccgcagactcataccagacgggagctttcttatcgctcttttcaacgactttatatgcctgggcaaacaatgaacctgttcccatgcagaaaagcaaggcaaccgtaattcctattcttttcatcttcataagcggttttcctttctttatttccaatcaacgggcagattatggataatcactttacagttatccaccgtcatttctacatacgaaagtgtagcacaaggagtactgacacctttgatttcgaacaccttacctattctgacacctttcggcatcttgtttccataagtccaggaagtacagccattcgtctctatctgagagaaattagtaaaggtcgcaccatccggatcaatcgccgaagtcatacgaatagtcgcactgttattcgtcacacctgtattggtgaagcgggcatagacacaaatactttcagccgtttcattgccttcacaagacaccagttcgaaagaaaggtcattgcaggaaaccgaaatcttacattcgggcaaaggagacttctcaggctgcacgacaaccggttcaggagacgtcacaggctctgcgacaggagtaggttgcacttccggagcaggttccggggaagccggttcttcgggagccggttcaggagtaacaggtgattcttgcggctcccgcttccctatcttttgcaatatacccaacacttcatcgtagcaaggtaccgtttcgggaactataaacaaataatccgcagcttcattcaagagcccggcatctatcagcacctccgcttttttaatgatgacaggacaattctgctggtagaaatcagcaatacgcttacgtgtagtgcggatgaaacgtacaaaagccggatcggtaaccttgatgtcggagataagcgaagcaatcgcatcgtccttactcccggtagcgtctccctgtacctcgataacggccgttccatatacactgtcgtcatacttattgcgggctgtcaatgaaaattcacctgtaaccagcgtcacgtcccgcagtaatccttccgtcttcttcgtctctccgagaacaagttcgggctgaatgacgaacgcattgtaaagtgaagcagttccggcattattgcgggcaataatttgctccactttcagtttcagtgcatccatgttcttctggcttaatcccttctgcgtgggcgtacccgccacaaaatgaatgttatcctgcgccgccgcacccagcgaaacgagcagcagtaaagcccatagaaatctattcttcttcataaaatgcagatttatttaatggttacagtcaacccttgccccattgtaactacagaggcaacatattctccccctaatttctcatcgaggaagttcttcagttcggtgctgaagcgggaaatggtataagcgcgtccctgcgcttcatcccaaattggcacttgtacggacatatcgatcaccttgtcgttgctgcggctcatatcgtaaacaccattcaaggcgtgaacctgcaaccagtcttccaatacggtcttgaaacttgcgcttccatcgggcaacggctggtcaaaatcccagtcggtgatggatttcgccagtaccatttggatagccatctcacgaccattcttcacaatgtcattgaaagaagtctgcaacttggtaaagaactcatcttttacctttttgagagcatagtccgtcagcttaatggtatctgtagtgacgtacttaccactttggaaagtggcgcttgccagattgcctgccgtctgaaattcagttgccgtcagctccagcgacacttcgctttgacgtcttgtatcagtggttgtcatcactttggcagtcacaatgatatccgcacccatattctgaatcatcttagttacggcatcagactgagtaccggctgtcagcacgtcattccgtttcgcccgtttcagttgggctaggaaatctttcgtcttatatccgcgtgaactgaactcactggtcattttgctcacggcataactcaacatctgattgtgatccaggatagcacgtatatcttcatcttccctggtataaggaaccaccgtcaccgtaggcaaacttacctggctgttgggagtgcccactgccataccaagattagtctgcaccttattccggttcagatctttctgcaaagcatcgaacagaatagtcatttccaccgtgcagcggtattgcttaccttgtttttccggtccctccgtaattgtatagtccttaacaaacacggaatagcggttttcatcaaaaaagcggcggtcatagtcaggttttgcagtagagaccatcggatttcccttattgactccatccacccccgtatagaataaggtataaaaggcagacttcaatgccatatttgccgcctctttcttcttctcactgatacccagggcacggacagtcaatgtgtttccctgctgttgcagaaagaccacttcactggaataattctgtccgcaaagagtggcggacagaaatattcccaaaagaaacataaaacaatgcttcataataactgtatggttttattagttgaaaatcccgcccatcaatgtctgttcgcgggaaacgatctttatcggttgctcatcacggatggctttcatgatttcttcaccacccttctgcaccttacacaaagagatatcatctccttcaaccgccttcacggtcaaacggccgatttccttcttggcttcgcgtccggcaacttcacgtatggcataaacagtaaatttctgggcttctttcacaccattcatggagccgaggttaatgtacacttcctctgccttgcccttcttctcgctatttacttcaaggatagttccttccattttgaagtattcatccacaaagtcgcgcatgctgtataccgcacttttgatagtgttggcaatggcttcttccttattaccaccggttcctccggtcagtccgctgtgctggaacgtctttgtaccgatcaatgtaccgttcttcggattgataactttcagtgtataagatactgagccatcataatatccttttccatctcttgtcttataagcagcagtcatagaagatacctgacctgtaatgatgaactgtgcccccaattcttccatcactgagaggcggtccatttcattatcgtcacccgaagagatattagcagatgagcgacgttgcgattcaatacgcaaggcatcctgtgcatccacatcaatcagaatcacacgttccatcttctgtataccctcaatcaccgtattacgcaagccctctacccacgagaacggtgcatcgctggatcgtttgaaatagtcaatgaataccgtaggttttcccttcggctcatcaaagttctggcaataaccggcaagtgaatataccacacaaaacactaagagtacaatctttctcataaacttcttgaattatataatttaaacttctgaacttgcatcttactttaatttttcaaaaataaacatttgttatcaaaccgcaagagcgtttacgtttattaactcaaaaaagaaatacaatcacggaaaacagtgacaacccctataccgtgtaccgattgtatcagaatcatgtccgcatcgtacccgaaccgtatctgcaccgtacttgctccgtacattctccactcagaggtacctctgagtggagaatgtacggagcaagtacggtgcagatacggtttaaaggtaatccaagtcgtgataagtgagtcggtaagtgagttggtaagccgcggtaagtgagtcggtaagtcgcggtaagtgtacagtagcaatatgtggtacgacttcaagtggttaaaactccgtgcgatattgcctcaattctttccgcaaagcttgggcttttccttccgtcaattcatcgagaagtgcccagaaacgctctccgtgattcatctcacgagtatgagacaattcgtgcagaagtacatagtctatcagatgtttcggcaacaaaaccagatagtaagacaggttgattgtgcgccgtgccgaacaactcccccagcgtccactgctggaattgatttttacactttggtaaggcaaattgtgtttctgtgaaagcatatacagacggggtggaagaatgatctttgcattacgacgcagagcctcctcgataactttacgtaaccatgcttgtaattccgcatcagcaaaatcagctcccggcggacagataatctgcatctctcccaactcggagcgtgaaaggaaacgttcgcgctgtccgcttacaagacttaatttgaagaactccgtatcaatccgaaaatttaagtctatcataggatgagtatgttttttccgggccacccgcaaacggggacgcagttcttctatcgcattctttatctctttaagtgtagttcccggcggaatggttacatagatagcgtcttcccgcgtacgaaaagtcaaacgccgcgcacgggtattcactttaataagaaagcgtccaagttcattatcttccaatacattttccaaaacgacaaaacctcccaatgaataaacaaacaaataaacgaaatatcgttcgaatatacaaatgactagatacccaaaaacggacaagtgtccgaaaatgaacacctgtcctaaaagaatgcacactaattatcagcactttattaaattggcatgaatattgagttataagatgtaaccggacgttgcaaaaaaagtttctgaaaaaagagaaaaaagtatgcaaccttttttaagcaacttacgtctaatagataaacaggaataatataaatgaataattataaaactaaaaaagttatgaaaaagttagcaagcctccttacatgcatctgtttaatccttagtacaacagcgtgctcacaaagcaagaactacagttcaggtaactggggtagtaaaaaagtgatagccagcaacaaatacgtaacaaaggacatcaaggtagataacttcaagaaaatcagtgtagccggtagccccgatgttacgtttactcaaaagtcgggacgccccgaagtagaagtctacacctcggacaatattgttgatttgttggatattaaagtaaaggacaacaccttatatataggtttcaagaaggatgtcaatgtgtcttacaagaaactggaagtacgtgtatctgccgaaactctgaatgggatttctgttgccggttcaggggatgtcttcctgaaaaacggtcttcagactaatgacaatttatcaatcaatgttgccggttcaggagatatcaaaggcagtggcatcaaatgcaatgatatgaaagtgtctgtagcgggatcgggcgatatcaatgctgataatattacttgtaataatctgaaagtatccgttgcaggatcgggtgacatggtattgagaaatgtaacagctacgggcacggaagcaagtgtggccggatcaggctcggcaactattaccggtacaacccaaacagctacttacagcgtagccggatcaggcgatttgcttacagaaggttacgaggctcaacgcgttaccgccagtgtagcaggctcgggcagcatcaaatgttttgcaaccgagttcctgaaagcacgcaccagcggcagcggaaagataggctacaaaggaaatccggaactggattacccgaagaagagcttgtacaaactttaagattctctcttacgattattataaaaaggatagtttaacaaacatcaagcgaaaggggttccgggaggaagcccttcgttgtttttatacaatgatgttatttcaaacgaagacgattcgttttttttcggttatgaattaattcaccacagattacacagattgacacagattctattttactgattattagattaataaatctgtgtgaatctgtgtaatctgtggtgagtcttattcattcctgtaccaatatgaattaatttctcaaaaggcttccctaaagcacaaaaaaaatagggaaacctcccggcctccctattcgtattgttaactttaatattaaatgcagagtatatctccatttaatgcctttatgccttagcggatggttttcaaacctttcatctccgctttatcagcctctttgatgctgatggcaacgccaccgctggcggctaatttctgtttcagtacactcttaggtgtcactactaccttacgtatacgatagctttggggattggtgtcccaatctgcatccttgccatcttcgtaaatggtagcgatatattgttttccttccggaagccaggagaaaggaatcgttgccgtacgactattctcatcggtaatgccgccaacaaaccattcgtttttaccttttgccttgcgggctacggtgatgtaatctcccggttcggcttccaggtaccagctattgtcccagtctaccgcaacgtcttcaatgaatcggaaggcatccgggaaacgggcgtaattggaaggcaagtcggctaccatctggataggagaaggcatggtcatgtaaagtgccatttgcttcaccaaagtggtatgcacacgttcgttgggtttctcaccgttataataagacagtcttgtctcgaaaatacccggggtatagtccatcggaccacctttcaggcgggtaaaaggcagaatacaggtatgatcgggatcattgccacccattgtttcgaactctccgccacgggccgattcctgagccagccagttgggataggtacggcacaaacctgtggggcgtactgcctcgtggctattaaccattactttataatcagcagcgcgacgggctacatggatgtaatggttgttcatccattgggaagagtggtattcattacgggggatgatataacctacgtaaccggttttcacggcatgataaccattgtctaccatgaactggaaggcctcatccaattggcgttcgtagtcggcagcattggcggctgtttcgtgatgcatcaccatttgcacgcctttttctttggcataacgctgcagctctttaacgtcgaagtcgggataggctttgttgaagaggaactgacggtctttccggtaggaagcccagtcttcccaaccttcgttccagccttctaccagtattccgtcgatgccatgggcggaggcgaagtcgatatattccttcacatgggcggtattggcggggtgatggccattaggtttcagtttggtataatctgtgatgccgggcttggcctgatagaaatcactatatgcccaggtctttccttcgcctgtgaacatttcccaccacacgccgacgaatttcatcggacgaatccaagaggtatcttcatattggcaaggttcgttcagattataaatcaattgagaagcaagaatgtcacgggcatcatcgctaacaataacggtacgccagggagacagcacgggcagttgcaagtaacctttcttacctaatttatcgggagtcaggtgggcactcagtttaaactgcttatcatctacatttagcaacataccggcataatccactaaagcggcttcatggatattcaggtagatgccatcttcgcttttcatcattaacggggtttgcactgtcaggccgccttcagctttagattcataagattttttggcaattcttttctccatatccactgcgatgtccgatagaggggcggtggtataggcaaactcgttggtatcataatcaccggggatgcaaaaggctttatgatttcccgtgagattgaattcggttacttcatcttttacggtgaggtagttcatcttgcgttgcaaaggcagttcgtagcgaaagcccagaccatcattgaacaggcggaagcggatctttagagtccgtcctgtttccggttgttccaaggtgacggtcatttcgttataatgattccgtacccggttgtactcaccccaaacgggattccagtagttatcaacagaagcacgttcaaggtttgtttgtttgaatcctcgggtcaggtcggcttcttccgtcaggagacctaaacgaccggaagttaaaacgggtttgcctttatagtccagccggtatgccggaacgccatctgcctgctccataaataccagtgacaggttaccgtcaggagaagtgagttgctgggccgaggcgaacgaaccgaggcaaaggaaaaaggcaataaaaagggaatgtttcatattctattatggttttagtattatacataaactgataatttacaagacgaacattgaaagacagaactatcccaattcccctcatcttgggaggaggggtgcccaaagggcggggtggtaggtagggaaaagattccttagacttatgattgataggtattttattgcttcacctaccacctccccctacgggtactcctcctcccaggaggaggagaattaagttactccatattatagttacttcatattatagttactccatattataaatgcttcgtaattatatcgagcttgataaattatcatttattcatattatcatatcatcatattatcaatacttaaagattcgatactgataagggcacagactcagttctgcttccagcttctcttctgttccgctatacatatctctacttggatgtccgttccactcttgcggaagcgtcacatttacttcacgattacgtacatttacagcaaccaacacacggtctttgccatcctgtttctcaaagagtagcacatcgggttgcggatatgccttcaatccccctttacggatagccggatactcgttgtaaagagccatcagacggcagtattcctgatacagttcaccgttccccatccaatccaccggaacatacgtaaagaagttgatagcttcgggataacccgtctcttgtgaaccataaatcaacgctcctccatgtagataagtagtcagcacgaaagctgccatagagccgcgcacatctccgaattccttagtaggcgacatctttgccgactcatcatgattggtggtaaaacgcagcttcacttttcctacggggatagtatcatactccgccttatccgtagcaaacagttcctgtgccggagcatcttttacgaatacatcgcgaagcgactccagaaagtcccaggaataattcatatcgaaacctgcatcaaagtggtcgcgtcttttcccttcagccagcatcagcaacgaacgctcggggatggcacgcaaagaatcgagcgcctgcttccagaagtcgaagggaacaaagtccgccgcatcgcaacggaaaccatcgatgccgatttcagtaacccaaaacttcatggcttcaatcattgccaagcgcatctcctgattatcaaagtttaagtcagccacatccttccaaccggttccggcaggaaagattatgtttccggcctcatcctgcgtataccattctttgttggcaatccaagcattgtcccaggaagtatgattggctacccagtcgataatcacattcatccccttctgatggcaagtggcaaccaaggccttaaactcatccagtgtaccgaactccggattcactcctttgtagtccttcacacaatagggggaattcacagatttctcctgccccacttcattgatcggcataaaccacaccacgttgattcccaatgcctgaatggaatctaagcgacgctccaccgccttgaatgacttctcaggagcaaacactcgcggattgacctgatacatcaccacatcttccacagcaggcaatgccgcaacttccaccgccgcttcgccctgccgcttacctgtacaggcagcaagcagacacagcagacttacaataaatatatatttcttcatattatccttctattttccagatgtaatattgatagggctccaacgtaatcgttcttggcaacacggtgctttctccagtccaaagattcttcgcactatcccctacccgctccataggcagattcaatctttcctgattgccactggtatttatcagtaccagtatcttttccgtactggagatacgataagagcatatcgctttactcgtctgataaagtttgatctctccattctgtaaagcaggagaattgcgatacaactgcatcagtttggtataatccgcctgataatcggcattagagttccagtccatcgcctgatagccaaagaaagagagggccttgtcataagccagttcctgcgaactataaatcattgggcagccacccatagaaatagaggccacaaaggctgagaaagcaccttccttggtttgataagcctgcacgggcgatttctcggaagccatatcatggttggtggaataacgcataagtaaccgtttatctgttaccgaagcaagctcactacgatgtgtatcatacagattagccacagaagcgcttcctgcatatacatcctgtagtttataagcgaagttccaggcatacagcatatcaaagcctgcatcgtagagtgcggtttgtgaaccttcggccagcatcagcaaggtacttttggcggcacgaagcttcgtgatagtttccttccaaaagtcattgggcacaccttcggcatggtcgcaacggaatccgtctatgtcagcttcggtcagccagtaaagcatagcctcctgcatggcggcacgcatggcagtgttgtcataattcaaatcagccacatcgtcccaacccattcccgggggagaaacaatattgccgttggcgtcctgcgtataccagtccttatgttccgtagtccaggtatgatcccaggcggtatggttagctacccagtccaggattaccaacataccttcggcatgggccttcgtaactaatgctttcaaatcggacagtgttccataggcaggattaatagcccgatagtctttcacacaatacggagaaccgacagcattcttttcaccttgctggaaaatgggcatgagccaaagaacattagcttccagctttttgatacgcggcagttgggcagtcagtccattcagtgcttgcgtttcaccgaagagtgccggattggcttcataaatcaccattccgtctgtagtaatgtcatctgcgggaggcggcatgtcaggatcatcatccgaactgcatccggtaaagctcaacagcaaaaggctggagcacaaaatcttaaggatatcctttattctcatatctatttaattaattgagatagtataagttataatttcaaataatctgtttcaagcaatgaaactaagagtttctcggtgtgatacagagagtttcaagtaatgaaactacttgtttcaaggcatgaaacaaacggtttcccatcttgaaactcaaagcatcttagggcttgggcagtttttcataagaagtagctgtgatagagaagtagatatctcctatcaatgctgtatacagcccgccatcttctatttgctgtccgcctccattgttattgaaaatcagattcgaatacttacctacgtgctccgataaatcaaagtacttatatgtaacaccattgatctccctcgttccggttacttgtatgcccggccaactgtcgccaattgcagcgtcgccccagccatagagagtcaaagcttcccaaccggagttatcctgtacatacacggtgcaatcttttatttcactacaacccgcttccgagatgcggagatagtaatcgcgatctatcgtcagattatagtctttcaactgatttccaacgccgttatcattgaatatcagattgatattcttatttgtgcaagccggtgtcaaatggaagcacttatacgttgtaccgttgatttccttcgtttctgaaacctgtatgccgggccagctgctaccaatagccgcttctccatagccatacagcgccaacgcattccaaccggtattatcctccacataaagggaatagcttgtaccgtgtgttgcaggatctatctcctcacatttctcaggagttatgctgaaatagaaatcgcggctgaaagtgatgttctttacgaaagacagcacgagtcccggatcgtcttcctttttgttattattaaatgtcagcttcagactctgattcatcaattccacatcggtttcaaagtatttataaactactccgttgatttccttcgttccggcaggttcgagtcccggccagtcttcattgttatcacctgccccggagatgtaaagtgccagatctccccaaccggactggtcgtctacatagatgcaataacttgcttccggatctatctcttcaaagcctttatcggtaatgcggaagtagaagtttctgttgagtgtcaccaccggaccgtcaaactgctttccatcattattattgaaaattagattcacaccttcataaccatccagagctttccccatatcgaagtatttataagtaactccattgatcacttccgtacctttcaccgcaatacccggccaagcaggtgttacatcaccggcaccagcccaaccgtacaagtaaagattatcccaaccggatttatcagccacataaaccacaaagccatcatgtccttcttcttcagtttcaaaatatgctttccagcggtccacccatacattggtacgggttcctacctttacatccaactgatgcaccacagcctcattcttcaccgaacgttcctcacctttcgaggccgatacgaagtagaagccgtctgccagtgtctttccatctttgaaagtagaaggtagcagatagattccccacttggattcactaccggtagctttctccaactgccattccagattacctacagcagcttcggctcctccgttgaagtcgcccacaatgtagtattcgtcatcggcagcactgcctttcggcatgatgacttccagcaatatagcgttcgccttgatttcgaactgaggcagttcatcatcgaatataatcgtatctgtatcgtcgcacccgttgagcagagcaaacaacggcaacataaacagccaataaattatctttttcatggattttctgtttttgagttatttataattcgggttctgtatcagtccttgattgacaagcaatgcagaagcaggcaacggataccactcatatttacgatcacgcttggcgggataaagttgcccattgtctgtggcacgtccgaagaaccaccactggccttgcgtgaatttgtcgaaacgacgcaggtctgtacggcggcggcgaccttcattcaggaactcaacaccccactggctcaacatccaatccatatcgaaagcagtgaagccacggcccggtttgtctttcacgtctgcccagtcgccggcactgaagtaacgtttacgtacttcgttcaccagttctttggccttgtcggcttgtccggcacgcatttcacactcggcaagcatatagtacacttcgctcaggcggaattccacttcgtcgatgttctggaagtcgatggctgcggaagtaggatataccgggtatttcaccagacggaggccggagttcgtctcaccccaacgcggtgacatgacggtttccaagttgcgtccgaggttcataaacgtacctacctggtctacatacgccaagtcttgtccgtcacggtcggcatcggctttcaaagcttcacccttaccatagttagcttttatggtacctttcaggaagataccgctgtagccgttcttcttatcataattatagttctttttacggatgtcgcggtcgtcgaagcgttcatagactgcacccagtttatcaccataagccgcatcgaggaagcaggtagctccctgtgtacctcccagttcattcaccgttcccgcattgtcatacgaaggaaccagacaagtgcagttccaaccactctgactgtaagtgcctccgaaataatcccagatattataaggatagaaagtcatgcgcatccatcccatattcagtttaccgtcttcgcaagcaaaagccatgatgacttcgggacattccgtattattgatagagtaaatatcgcggtaatcctttgccaattcatatttgccatatttaccgctgattatttcacggcacagttcggcacattcggtatagtggctttctttgatgaacacttcggcattcagcaacagacgggccttgatcatacggttcacagccttgttcatgcggttcacctgattttctaccattccttcgtagcaatcatccagctcggtagcaatgaagttataaatcttcttgcaacttgtatcgaagtccgggtcggcagtgggtggcaattcaccgtctacggtggccggttcaatattcagcggcaatgcaccaccccagatttcgaagatattgtaataagcccaggcacgaagtgtacgtacttcgccttcataagctttcagtttctcatcagtcatcttcaggtcggcagaagttagctttcccatatcagccaataaggtgttacacaggccgatagtggtccatgcattctcccaggcactacggataatcttggcatcgggagtccagttctgaatggagaagataaacttttcgccttcatcatatccccactgaccgccattccatacacgccaggtcacctgatcggcaggaaattcctgcatgtaccagaagtattcggcataactggtagcacctgtggaataaatagtagctaccgcactcttcacactattctcgtcctgataatagacgccggagtctacacggtcgaacacttcttccgtaaggtcgaagcaaccgctcaatgaacaacccagaatgattgccaacagacatttatatttcagatatttcataattcttttctgtatttagttattaaaggagttgacaaggcttcaggcgacaagttgacaaggggaaatgactctcttactaaacgaaactattatcctcgttcccttgttaactgcaaccttgttaactatatctatttgaaacggatattcaagcctacgctcaactgagtagccgaaggataggcactgttcgtatctacacccggagtcagtccgttgatggcaacagctgaaggatcgttaccggaataaccggtcagcgtaaacagattcttagctgtcagataaactctcatacctttgatgaacttgttttctttcggagtgatggtatatcccagagtcaggttatccagcttaaagtaatcacccttttcaaggaagaaagaagagattacaccgccaccggttgtaatatccgcatcttttccataagcatcgcgcagcacattgtccgtaccgcaacctttcagacccattccgtaacgacgcatattgaagatttcaaaaccgaaagcaccgttgaacatcaggctcaggtcgaagttcttataacggagcgtattactccaggaaagataagaggtcggcgtaccattaccgatatggcgtttgtacttcacatctgccttggatacaggaactttttcgccttcatcggtataaatcatcatatccccattctctacaccggcatactcgtagccatagaactggccgatcttgctgccttcttccacgcggaagaagtactcgctggtacctacacccggcttctgatacagttccacataagaagctttgtacaggctgttggagagtttatccagtttcgtagtgccgtaagagtagttgatacccgttgtccattcaacgggagttcctttgaaagcgtcgccttccagagaaacttcgataccacgattcacagtggttcctacgtttaccagaattgtagagtagatgtagggaggctgtggagccgtatagttataaagcaagtcgcgtgactggcggtcgaaccattcaacagaaccgcgcaatctgttccacaaggcaaagtcaacaccgatgttcatactgacactcttttcccagcccagtttggaattggcattcactgaaggagcataacctgttacccaggcaccgtccatcagataggtatccgtaacattcaactgggcatttttatgagagccgtaagtggctaatgactggtagcaatcgaagtccgaacgacctgttacaccataggaaacacggggtttcaaactctgaacgatgttttggtggtctttcaggaaacccatattcgccatttcccaggcaagagaaagagatgggaaagcaccccatttatgatctgcaccgaatttcgtagagccttcgtagcggatggaagcggaagcaatcaacagattcttccaattatagttgatacgtccgaagacaccgatcagtttggcaagagatttaccagtacccatgcttgcttttcctttagcaagataagaaccgcttccaaggttattccagagaatatcatcgaaattgaaatcactgtttccggcttgcaggcgttcccaggtggtttgctcatagttgtaacctaccattgccttgaagttgtgatcacccagatccaacgagtagttacccaaccactccaggcgggacgtataccacttctggtaagtcacttctgcacgtccgttataaccgttccagtaagattcaccggcagtggaaggggtataatagtgttgtttcagatcgttgtagtgcaaagagtagctcaatgaagtattcagcatttgcttttccgaacggatcaggttgacttttacctcagcagtacccagcaggtaaacacgctgaccgttattgtcgatttctttcagttcctgcaccgggttgcgtgctccggtaggagaagtaggctggaagtaagttccatcctcgttatacaaaggcatggtagggttcatgctcagggcagtatcgaacataccgtcgttaccccatacttcattcacgcgacgggcgttgagtgaaccgttcagttctacgattccatccatcatacgctggttcaggacgaagcgtccaccgaattcttcacgactgctgttcagatcgaggccggttgctttcttataattaaaagaagcgccgtagtatccgttcttggtactgccgtcgatagaaagatattggttgttatcataagagaaatcacgcagcaagaggtcataccaatcagtagaatacccataatccgttgcacgacgggaacgacggaattcgtctgcactcaaaatatccggaccgctctttgctaggttcacaccgaaccagctgtcgtaagtcacttgggcacgtccggcttctccggctcccttacgtgtagtaatcagaatcacaccattggcaccgcgtgttccgtagatggcagcggaagcggcatctttcagtacggtcatcgactcaatgtcctgtgctgccaggttgcggatatcgccacctgccacaccatcaattaccaccaacgggtcattggatgccgaaatagatgttgcaccacgaatctgaagagaggaacttgcattcggattggctgccgccgtattgtttacggtcaaaccggcaactttaccggtcagcatctccatcggattgttcatagaaccttgcaggaacttcgatctgtctacctgcacaatggaactggaaagctctttcttgctcaatgagccgtagcccaccacaacgacttcatccagtgcctgagcgtcttctgacagcactacattgatttcctgacgtccactacaggggatctcttgtgttttgtagccaataaaggagaaaacaaggacggaagaaggcttcacgcccgacaaagtgtaattaccgtcaatatcggtaatgataccattagttgtacctttcacggttacgttagcaccaattacagtttcgcccgtggtatccgttacttttcctttcacggttaaatcctgggcaaaggatgccactgcaaaaagtaatccggccataagaagaagagaccggcacaaacataactttgttctttttacattcatactattagtttttagattagcaatcattctgttcacctccacaggttgaggcgacagtgcaaatgtctgtaaaaagaagggggaaagaaaagaggactaaagaaaatctagattaacaaaaggatcaaaatattatatatcagcgagataaaacaaataaagggcgttaaaaaactaaatgaaaacaaagaaagcagaatagaaaaaacgggattttgggttatttcggagggggtatgaattaattcaccacagattaacacagatttccacagaattttatttctctgattttaattgattaaactctgtgagaatctgtgttaatctgtggtgggcaaattcattactataccatatagctcactaaccagcaaaagacccaatcttcatcacctcttcctcaaaattatcacggcaaagagaacgattcttcaatttggaacgataggtataaatagtagtaatggaataacgcaggaagcctgcaatcttggcactgtccgtaattcccaaacgaattaaggcaaatatacgaagttccgttgtcagccgttcatcctgtttaggaataattctttcttcttccggtaacaactcattaaagcgtttcacaaaatcagggaaaatactaaggaatgaattatcgaagttttgatagaattctttcagttcttcatcgatgaaacgggacgatttcaacgttttatagagttcttccaccttccccgaaactgcctgtttgttaagcatccgacggtatccctccaacttgtcaatgtatgtggaacacaatcccataaatcggccgacatactcctccttaatatgattagcctccgtcagtgagtcattcgtttcgtgctgtctctgatttacttcgatcaatctttcattcagaagtttcagctcttcattcattgccagcaaatcctgtcgcgcacgggccaacttcttcacctgacgaattacataccagaccgcacatgccagaaacagcgtcagcaaactggtaacaaccaggaagatctgtaacacctgctgatgcttctgtttctccacctgataggcatggtctatgaccgggagcatccttgaagcctgcacattccggagacgggcattgtagaaattggcatcttccatactgcgcttcatataaacatccgcccgttgtaactgcccctcttcatataacagttccgccaatgcacgcaaggaattattttctttcaccacaccacgaatatcggcaattgcactctttatcaaatattctttttgcttttcccgctgtcccgtactctgatagataaaagcaagaatagaggtcaccactgcataatcccgtgtatccggtgaaagtttttgatgataaacttccaacatttcaatggcttcctctcctcttccttgttgcagaagttcgggagtataagctatgacatactgataagccccctcttctaccatctgcaatacagagtcgcggtagatatacaggttattcagatattcaatctgatattcgtcatccatcgcatactctgcatgatagagataaatatcttcaaaagtgatgtaatattcaatgagttggtctctggaaagttgcttgctatctatagacttcaacaaggccacgccttctgcatacagacctgtctttcccaagatacttgccttcttcagtttggcctcattcagccagtcttgattgttgtgctgaagggcaatctcgatattgcgattgatataatgtcttgctgaatcgcaaatatacgcttcatattcatcaaaaagttgttgattgatatggtactcatcagatggagaagtacttttacgagtccggaaatattctttaatctgatcaatgcgtttcagtctggcctgctcatattgagcggtgttttcaattgtcctgtccagaactaccagtaaagaatctattttctcctgcgcttgcagaaggcaacagaacagcaaagagattacaaaaagcaggtaccggtctttcatgcttacaaacgtttacgaacaggacaaagatataaaatcctactataataaccatcttaccagttcgtttttaataaatcgtctcagctttgaagagcatatatacataaaagggacgctgcatctcgcggcgtcccatctatcttagttagtttttataagaatttgagagaattgaaacttcacagcctcaatttgttgttttaataaagcacactaactatatttatgtttaaagcaaatgaaaatgttattcttaaaagcaaatgaaaacgttacttcttcagttccaccttcttgtctatccgttgcagactatccagaatctgttgttcatgggtaatcgtcacgtctcccgagagagctaccgaaggtgtggtaatttgtttgcctatcgtatcggctgcggctacttcttttatatcactatagaatgaatgttgcatcacattccctaatgaaagtaccactgccactactgcggcggccttgaacagcggaatgaaacgtgcggtaagcgtcaagcgttttgctttcaccaccggagtctccacttctgcaagcacacgggcgtcgaaatctgctcccaaccccacttcttgttgcagttgctgatatacgaacaaatctttgtagcgaagcaaatgctccggaacgtcgcttccgttaaagaaagcacgcaactgcgcttcttcctcaagggaagtctcacactgccagtagcgttctaaaagttgttctatatatttacagtccataaccatctatatctaaataccgttgttttactttttgcctcgccctgaaaaggttcacttttacctgttcctccgtcaaatgcaggacgaccgcaatttctttataactcttaccctctatatcccgaagctgcataatcagcctttgtttatcggggagttcattgaccagacgatggatgagtgtcatttgctctttatccaccaagtgatcgtaaggattggatgctccggaagtctgttccatttcaggtgtcagttccacggtctgagcgtcttttctttcgctacggtctattgccagattctttgccactgtcaggcaataagcctcgatagaaccgaatttcgtccactcatcacgtttgttccagactcttatcagtgtttcctgcacaacgtcttctgcctctgctctgtcgaaagtaatccggagagccaaccgaaagagtttgtctttcagagggagaatgtcattccgaaaactgatttcttgcatctctattaataatgacggttaagtatatggaaagttacagttgatcactactttttttgaattattttttgatgcgggttccgctattctcgttaattgctgacgctaaagtaattaccacttcagttactcccgcattcaaagcttcaaaagaattctccagcttgggtatcatacctccttgaataacaccgtccgctacatattgtttgaattcggcaggagtgatctgaggtatcacgctatcgtcatcgttctcgtcacgaagcacacccttcttctcaaaacagaataccaatgtcacatcgaacaaagcagcaagggcttttgcagtctctcctgcaatagtatcggcatttgtattcagcagattgcctgcaccgtcgtgcgtcagcggagccattacgggaactactcctttatggatcaaatcacccaaaaactctgcattcacttgctttacatcacccacaaagccatagtcgacgtcttttaccgggcgtttcacggaacggattacatccatatccgcaccagtcaatcccagtgcattgacaccacgcgcctgaagtccggctacaatattcttgtttaccagcccgccgtacaccatcgtcactactttcagcgtttcggcatccgtgatacgacgcccgtttaccatctggctttcaatgcccagttgggcagccaattttgtggccgaacggccacctccgtgtaccaagactttgtagccctcgatagctgcaaagtcatccaacaacttatggagggtagcttcttcctccacgattttgccacccacctttattactgttagtttttctctcataattcagttgacaagttttttagttaacaagttgacaaggggagaagacaaaatgaacaaagcaataaagcgcagctccttgtcaacttgttcccttctcaactcgtcaacttttcttattccaaataggtatatccgtacagaccggaacgataattggaaaggaactctttaccttcttccaacgaaatacgtccctcttttactgattgagtcacccaagtctccagtgtacgcaccagcttcttagggctatattgaacatagtcaagcacttccgctacagtttcaccatcaatcacctgttcgatggtatatcccttctcgttaacagatacatgcacagcattcgtatcgccgaaaagattatgcatatcacccaaaatctcctgataagcacctaccaggaacacacccatataataaggttccttactctttaaagaatgagtgggcagatagtgtgccacattcttagtcgagataaagttagctatctttccatccgagtcacaagtgatgtcctgcaaggttgccgcacggtcgggacgttcatccaggcgctgaatgggcataatcgggaatatctggtcgatagcccacgaatccggcagggactggaacagcgagaagttacagaaatatttatccgccaacagtttcggcaatccgcgaagttcatcgggagcatgcttcaagccgcctgcaatctggttcacctcacgcataacagaccagtaaagacgctcaatctgtgcacgtgttttcaaatccacaattccatgactgaacaagtcgagcgcttcttcacgaatttgctgtgcatcgtgccaggcttccagcatcttattttgattcaatgtatcccaaatgccataaagttcctgcaccaattcatggtcttcctcggttacttcttcatcatcgtcccattcgggcaaagtggtggtttccaagacttcaaaaataagtacggaatgatgggcagtcagtgcacgtccgctttccgtaataatattgggatggggaataccattcttatcactggcatctaccaaagtggaaatagagtcattcacatattcctgaatggaataattgacgctactttcgctactggacgagcgcgttccatcgtaatctacgcccaagccaccaccgatatccacgaattctactttgaatcccatagcatgaagctgcacatagaattgagacgcttcgcgcaatgccgtcttaatacgacggatctttgtcacctggcttccgatatgaaaatgtatcaatttcagacaatctttcagtccttttgagtctaaaaagtcgagtgcttcgagcaattcactggaactgagtccaaacttacttgcatcgccgcctgaatcttcccatttgccacttcctgaagaagccagtttaatacgaataccaatattaggcataacattcagctgcttcgccatcttggcaataagttttagctcgttcattttttctactacaagaaaaatgcgtttacccatcttctgggcaagcaaagccaactctatatagctctcatccttatagccgttgcagataatcaacgagtcagaatctgagttaatagcaatcacggcatgaagttcaggcttcgacccggcttccaacccaagattgaatttctttccatggctgataatctcctctaccacagggcgcatctgattaaccttgataggatagatgataaagttctgcgctttatagccgtactcctcagcggcctgcctaaaacatgaagaagtcttctcaatccggttgtccagaatatcgggaaaacgtatcagcataggagccgccacgtctcgcaattgcaattcatccaccaattctttcaaatcgacgccgacaccgtttttacgaggtgttaccactacatgacctttgtcattgataccaaagtacgaagtgccccaacctgtaatgttgtaaagctcttctgaatcttcaatacgccattttctcattttttgtaactcagatgtttgttgtttgattttaatagggcgacaaaaatacgataattctcgatatttattgcgttttccacctaaaattacacatttacaagcggttaaatgctcagcaagttacgtaactgctgcacagaatccgcaatttgccgacggctttccaactgcccggcatcgaaacggtatcttgccttaccatagtgcggtgcacgtttttccaaggcttctataatgaaaatccgcagttcttcgtccgtttttccttgcagaataggacgttgctgcgtagccactcgcaagcggcggaacaaaacgtcaggatgaacatccagaaaaacggtctgcccatgctcgttcatatactccatgttatcgaaaaagcaaggagtaccgcctccggtcgagataatgacgttttcaaactcagccacttcatgcagcatggttcgctccagttcacgaaaagaggcctctccccgctcaatgaacaattcacgtatggatttgtgaagacgttcttcgatataccagtccagatcgatgaacggtatattcaattcgcgggcaaaagcctttcctaaagttgttttaccggctcccatgtagccggttaagaaaatacgtatcataagcgcttacctttgcgtacaaaggtaagcaattctattctgagagatttactatcagataaaaattttaatgcgttcgctcaaatcatcaaattctttcccgcccggctcggccacaggagtaccgaaaggcatctgtgcaatcaactgccaggtttcgggaagatgccacgtgctgcgtacatcttcgtcaatcaacgggttatagtgttgcagcgaagcgcccagacctttatcttcgagcatagtccagatggccagctgatgcatggcagaagtatgttgcgaccacgtcgggaaattctcatgataagtagggaattgtttttgcagtccttccacaatggaacgatcttcaaaaaagagtatcgtgccatatccgcaagagaacgaagtatcgatcttcttctccgactggcgatattgttcttcggacaggcgttcttccaactggtccttcactattctccataatttctgatgttcatcccccagtaacaacacaatacgtgtagtctgcgagttgaatgccgaaggcatatgctttactgctgtacggatgatgtgtacaatttcctcgtcctgaaccggagagtcgttactgatagaataatagctgcgccgatgctccaatgcttcggcaaatgtccgttctctgaccatatttaatcctttcttttcgtaattatcatttttgtcttatatagtgaaacaagtgaaagagtgaagttgttcgaagttgtagaatatatttgtacctttgcacccaattatgagtaaagagaagttttacgttgtatggtcaggtgtcaatccgggtatttatacttcctggacagactgtcagttacaaatcaaaggttacgaaggagcgaaatataaatcgttcgagacgcgcgaagaagcggaaaaagcctttgaatcttctccgtatgaatatatcaaacgatcctctccgggtgctcccgcccaaaagaaagatgtgaatgctccccttccttcatctgtcgtagagaatagccttgccgtagacgctgcctgtagtggtaatcccggagctatggaatatcgcggtgtacacgtagccagccgacaagaaatattccatttcggcccggtatatggtacgaataatatcggcgagttccttgctatcgtccacggacttgccctactgaaacagaaaggcttcgatatgcccatctatagtgacagcgtgaatgccatcagttggatcaagcagaagaaatgcaaaacaaagctaccccgtgaacccaaaacagaagaacttttcaaactaatagagcgtgccgaaaagtggctacgggaaaatacgtatactaccaaaattctgaaatgggaaaccaagcagtggggagaaatacctgctgacttcggaagaaaataagcctgtacagggcttgaattaaatgaaacatcatcctacacccgccatttttgaataaattgaataacacttgaaaacaagtagtgttatggtccggaataagcaatgttgcgaatgattagattgcttgttctcatccacaacaagcaatctaatttcagacaagtctgatttcgttaagcgaaatctgtaagcgacatgtgaaaagcgagtaatacatgcgtacaaacactccttttgtacaaggggaatttactgttgattatcaaggtgttgcaaaggatcaatttcttgccgacaagaagttgggagtttgttggcaagaagttaacttcctgtcgtcaaactcctaacttcttgtaaaaggagaaatagctgttttttcggtttccttacacagcgtagttgatagtacgaatggcctatgtgttcaatcatctgtattagaaaggctgaacgcttttctttcatcttgcctcgtctagcggctatatatcggtggtattggatatatagatactgcatgtccgatatatagatgtgacacgtccgatatatagatgctgcacgtccgatatatagctaacatattcagaacatgagttttgaccaaaggaaatgtacattaaaagccaagaaaaagaagattattcttctaggaaacaggaggtaagcactgattcaaaacaacatgaagacaggcacagattccggtggtgtaggcaaatacctttcctacacccgcatataattttgcctacaccacacaccgttctattaatgagacgattaagtctccgggtgtaggatgtaggcagaattaataaatctttctattcagaatcgttttttgatcaagacagagattgcatatcattcaaacgtttatagtatccattcttctccaacaaagcttcgtgcctgccacgttccacaatttctccttcatagagtacgcagatttcatctgcatttttaatggtagaaagacggtgggcaatagctattgtagtacgggttttcatcaaacgctccaaagcttcctgcaccagacgttcggactccgtatcaagagcagaagtagcctcatcaagaataagaataggcggattcttcaaaatagcacgggcaatactgatgcgttggcgttgtcctccggaaagcttgccaccacggtcaccaatatttgtgttgtatccatgctctgtctccataatgaaatcatgcgcattggcaatcttcgccgcctccatcacctgctccagtgtggcgttttccacaccaaatgctatgttattaaagaatgtatcattaaacagaatcgcttcctgatttacatttcctatcaggccacgcaaatcatgaatacggaaattcttggtactaacgccatcaatcatgatttcaccgaaatgtatgtcatggtaacgcggaagcaaatctaccagcgtagattttcccgacccggactgcccaaccaatgcaatcgtctgccccttcggaacaacaagattgatatgtttcagcacttccctcttcccatcataactgaaagaaacatctttaaactcgatttgccggttcatgccatgcagaggaagcgggtttacgggttccttaataggattctcagccttcagaatcttatccacacgttccatggaagccaaacctttcgggatgttatatcctgcttttgcaaaatccttcaacggattaatgatgctatacagaataaccatatagaaaatgaatgtaggagcttccagcgaagaatgctcatcgcccaaaatcagcataccgccaaaccaaagcaccaatacaatcaaaagcgttcccaggaactcactcatcggatgagccaacgcctgacgaacggccactttattggtcgcatcacgcagttcattactgcatctggtaaagcgatccaccatcttatcttctgcaataaacgctttaatgatgcgcaagccccccaaagtttcttccaattgtgacatggtatcactccatttgccctgcgcttccaaagattggcgtttcagcttcttgccgacctttcccatcagccaccccattccgggaagtactacgatggtaaacagggtcaactgccaacttgttataatcagtgttgtaaaataaaacaggatcaaaatcggatttttcagcaacatatccaacgaactggtaatggagttttctatttctcccacatcaccactcatacgggcaatgatatctcctttccgttcctgagagaaaaaaccaagtggtaagtgcatcactttcgaatagaccatgatacggatatcacgaacaactcctgtacgcaaaggaatcattaccgcagaagatccaaagtagcaggaagttttcagcatcgtcataagggctagaaacagtcccataaacagaagtgtcattatcgggccatgaacctctatcaactgagtaacatagtaatagaaattatttattgctacatctttcaagtcaccgctcccccactccatataatggtagattttatcactgttacccgtcttgaacagaatattcagaattggaatcagcagagtgaatgagaatacattgaaaacagccgataaaacattgagcacaatcgcccaccctatatacttcttatatggcgacacaaaacgccgcatcaattgcaggaattccttcattgcttggtattaatgaattaggggcgcaaagatacaagaaatatctttaagataaagaagataaatttaatattaacgagatttatctatacaaccctcaagaaacaagccctgtagctcatttatatagatcacagaatgatatcggaaaaatatattgtatctttgcgcccggatataaaacaaacgctttattatgacaaagatcgataagtccgtactgacattcggaatcactattttcctgaaattcatgttattcgacatactatggtgtatcccgactacttttgcttctctttctacagttgaatgttatacaacaaaactgatagccacacttatattgcttatcccttacgccttcttccgtatgtggaaaacagagacgctcatcatgttcctgctggatttcctgctgatagccaatcttatgtacttcagaacctattataccgccattcctctgaacagctacggattatcaggaaacctggccgatttcaccggaagcgttttcgactctcttcgctggtatgatatacttttcccattatccacccttgcagcagccgtcgttcatcggcgtacaaaaactgcacatcagaagcgtcccgcaccggtgcttgcttattctgtggtacttgcagtcgtcatctgcatctttggcacagtgaccctgattaaaggcggattttcaaatgcatacaaggaatatcgcgacaaagcatatttctgttcaagcggcccctccctctataccgttttcggtagcctttgctatgatttggtaggtcagcaacaaaagttaactcctgaactggaagcaaagatagaagaatggttaagtaaaaagcccaaacacgaagttgccctgccggacagtagtactaatcgccgcaccaattgcatcatcattctggcagaatcattggaaagctgggtattagagaaagaagtggaaggacaggagatcaccccctacttgaacaaattactgaaggattctaccaccatctatgccccacatgtactgacacaggtaaaaggcggccgttccatagatgcccaacttatactctgcaccggactactacctatcaacagtggtacgtacagcagccaatatcccaaccatgtttacccttcgttgcagaaagccatgcacgaaaagaatcattcgcgcaactatctgctaaccatagataagatatccacctggaaccagggtcccatagcccaaagcttcggcatggatacgattatcgcctatcatgatttcgaactgacggaagctttcggtacccacaaacgtaccggagacggctcattctttgctcaatgtcaggaaaagatagaaaaaggggagatatggaaagaaggggaaaacgcatatatgcagcttattacctattccggccatgctccattcatattaccggaatatctcagagagatttcattctcctctgacattccggagaagatgggtaactatatgatcactgcccgctacacagataaagctatcggtaaattcgtggagtatctgaaaacactccctcaatataaggaaacgctgattgtaataacaggagatcacgaaggtttagcgtcttatcgtgcagaactatgcgaaagtcccggtggcaaaggtatcgtgtccgacaagcagtttactcctttcatcgttgtcaactctcccataggtatgcgttacgatgaggtgatggggcaaatagatatgtatcccaccctgctgaacctacttcaacttgacgactattattggaccggcctcggagaaagtatcctcaatcctgaaaagaaaggatttgctgtaggttcacagatgaatgtggaaggggaaggatatagtccggaagatgaagagtttgcaaaggaggcatatgatatttcggatgagatgatacggtttaattactttggaagaaagtaacggaaggctgttacatcagcactttccattctccaatcgtacgtgtagcactgttgaagtttactcccaccttgaccacttttcgaccatctgcctgataaggaacggcatactgtttactgtcaatctgcgccaaagcctcttcgggagtcccatcaaacttgaactcaaaaacataaatggcatcctgtagctttacgacggcatccgcacggcctatggcactctttacctcaacatccacatactgtcccatcaaacggaacaataaataaaatatagtttggtagtgcttttccgtcttgttctccaaatcattaggaatggaagcaaaaaaggagcgagtacgttccagacaaccgtcaacatctcctttcagtaaatcctgaatgaaggataccacatagaaagtattctcacgagggaaacggtgcacataagaaggaagcaaagattccgtgaaaccataacgaacttcaccgttaggataagccaatttataaagacggaaagtaggatcatagccttttatcgtcagatacccgctttggtagagcaccggaataggatcgacaatctgatcggtaggcgcatcaaactgctcctcggtagccgtgaggccatctaagctacgcacatcaaagtctacatgttgaaggatatctataaggaatgtcggcgtacccgtagagaaccagtagttcttgtattcccccgaatcaaaagcattgaacaagctgaaaggattatagatatccggacaagccttgctgaaatgatacccgtcatactgtcgcttcaaatgcgcgcaagcttcctcgtaagtctcaccgttcacctcggccatccgttcaatatcaggtttcaattgagtcagtaattcctgctcggtaataccgcaaagagcactgaaatcatcacgcatactgatatttttcagattgtttaattcgctaaagatactcagttggctaaacttgctgataccggtaatgaaaaggaaacgcaaatattgccccaatcccttgagagggctgaagaatttgcgcatctcgttacggagttgctgctgtaaaagggtatcagaattactatccagcaagggggcatcatattcatcaaccaatacgaccacttgcttccctgtctgttcattagctctcagtataattccctgcagacgttctgctgtagtagtttccgcttcattacttccataaatattttcccaacgatacaaaaaaagattcaattgtccggtaagatcagatagttctgtatattttgttaaactgaagtctatatgtaatacagggtaaaccgtccagtcttgctccaaccgctccataaccagaccgtggaaaagctccttcttccccaaaaagtaagcttcgagtgtggacacaagcagacttttgccaaaacggcggggacggctgaagaaatagatttgatcagtctttatcaatctgtaaatcaattctgttttatccacataaacacgattgagattacgcaactgctcaaaattttgaatccctatcggataacgtcgactattcatttccataaattactacggcttatagttaggagaactgttacaaagatagtgcaaatagaatgcatcttatcttttgcaaagatacaagaaaacaagattataaagaaggtgttccatgtttttaagaatctttgtttggagaaacagcagaaagggcgtacctttgtttgcattcaaaccaaacttctaaaaaggcatcagttatggaagaatatatagcaccgaacagaaaacgcatcccctacggcatgatgaacttcgccgtgattcgccgtgatgattgttattatgtagacaagacccgctttattcccataatagaagacgcggataagtttttcttcttcatccgtccccgtcgtttcggcaaaagtctgacggtaagtatgctgcaacattattacgacatagccgccaaagataagtttgatgctttgttcggtgatctttatatcgggaaatatcccacgcgtgaccgcaacagctacctggtgctctatctcaatttttccggaattgtcggtgaactgcacaactaccgcaaagggctggatgcgcattgccaaaccatgttcgactacttttgcgatatctatgccgactatcttcctcagggtattaaggaaaaactggatgcaaaagaaggagccgtagaacaatttgagtacctgtttacggaatgtaacaaaaccggccaaagaatttacctcttcatcgacgagtacgaccactttaccaatgccatcctcgccgatcctgagagtttacatcgttacaccaacgagacacatggcgaaggctatttgcgcgccttcttcaacaaggtgaaagcaggaacctattccagtatcgagcgctgtttcatcaccggtgtcagccctgttacgatggacgacctcactagcggcttcaacatcggtaccaattactcgctctccccaaaattcaacgaaatgataggattcacggaagaggaagtacggcaaatgttgacctattactccaccaccagccacttcaaccacactgtggacgagctgttggacataatgcaaccgtggtacgacaactattgctttgcacaaggacgttatggtgaaaccaccatgtacaattctaatatggtgctctattttatcaaaaactaccttgacaacgatggtaaagcaccgcagaatatgatagaaagcaacatccgcgttgactacgaaaagttgcgcatgcttatccgtaaggacaaagaatttgcccacgatgcttccatcatccagaccttggtgagtcaaggctatattaccggagatttgaaagaaagtttccctgccgtcaatatcaccactcctgacaacttcgtgagcctactctattatttcggtatgcttaccatcagtggcacatatgaaggtaaaaccaaactcaccattcccaaccaggtagttcgtgagcagctttatgcctatctactgagcacctacgatgaagctgaccttaatttcagcagttacgaaaagaacgagctgtccagttcactcgcctatcgtggcgactggcaaacttacttcggctacatcgccgactgcctgaaacgttacgcttctcaacgcgacaaacagaaaggggagttctttgtccacggcttcacccttgccatgacagcccaaaaccgcttttaccgccccatttctgaacaagatacgcaagccggctatgttgatatattcctctgtccactgctggaaatctattccgacatgaaacacagttacattgtagaactgaagtatgccaagtataaagatcccgaaagccgtgtggaggagttgcgtcaggaagcaattgcccaagccaaccgctatgctgatactgaaacggtgaaaaatgctatcggcaacacaaagctgcataaaattgtagtggtgtataaaggaatggatatgcctgtatgtgaagaggtataatcaatatagaaaaccaacaatccagattggcaatttatgccgataaggggtttctattccatctgccaatatatatgaatccggcaaatctgcaatctgattataccctttcccttcaccgccaacttccaatgtatagcatccgtttactttaaaatcgcctgttttcttaccatactccacctcatgcatatagcctaactgattcacaacaaacgtttcacgcgctgtacctatcttaaccggatgggaagccaaagcgtagagcagattaggattatccagatatatcttatccggcttctgcatctttttaacagaaagcaaatccgcatacagcaagcggagtaatttggctctttccaagctattcaaatattctattaccgtattacgatgaatgccaattgtagttgataatttagaaatatccacctcaaaaggaacagaagtggccagaatccccaatagtgctttcagcttacggacattaccaatatcaactccacacagttgaggcagctccgactcaataataaaattagtaacctgctcaatacttgtataataatccatctgattctttaaatagaatggataatatccatactgcaaatattccttgaaaaaagcgagagggcgacatacctcgttcactcttgagcaaatatctccgggagaattcaatacctcttccaaagtacatatcggcaaatccaactgtttataaaacagcataaattcccgaaaagaaagtccttgcatctcataaggaatacaacgcctggacaagtcggcatctgcattcagtatattaagtaaagaagatgcactaaatacaacccgcaaatcaggatacatatcataaatctcctttatctctttgctccaagtcgggtacttatgcacttcatccaagaacaggtgcttaccaccgtgtttatagaaagtatccaccaattccagtaaagtatgattagaaaaatacactgaatccagcgtacagtaaagcgcttcccggttatacgcctcataatgctgttttatatactgcaacattaacgtagtcttcccaacacctcgtggtcctcttatagcgatcagttgagcattccaattgatcctatgcatgagtgtgcgtacaatctcagtagacgtaagcattaataaacggtcctgcttggcaaatagcgtctccatacattcttatattttaatttcagactacaaatataagcatttgctgttcgtaaacagcaaaaacatcctttttctgctgtttacgaacagcaaattccctttcagcactaccatccgggaattttgagcgaatgcaagctcccatatacgaaccaattctgctatctctttttctctgttatagaacttcatacattgtcttttatatcgcaacagccattgattcaaccgctgttgcaaaaacaagaagaaatatggacttatgctattctgattaaataaaattgtggattacacagggaaaacaagataataaagaaagtgttccgtgtttttaagaatctttgcttggagaaatagcggaaagggcgtacctctgtttgcattcaaagcaaactttaaaaaagggcaccagttatggaagaatatatagcacccaaaaggaaaccatcccttacggcatgatgaacttcgccgtgattcgccgcgacaattgttattatgtagacaaaacccgctttattcccataatagaagatgcggataagtttttcttcttcaaccgtccccgccgtttcggcaaaagtctgacggtaaaatttatctcttcctcaatgagtacgaccactttaccaatgccatccccgccgatcctgagagtttgcattgttacaccaacgagacacatggcgaaggctatttgcgcgccttcttcaacaaggtgaaagcaagaacctattccagcatcgagcgctgtttcatcaccggcgtcagccctgttacgatggacgacctcaccagcggcttcaacatcggtaccaactattccctcacgcaggagttcaaccaaatgatgagattcacggaggaggaagtgcgagagatgctgacctattattccactaccagccccttaaatcacactgttgatgaactgatagagatcgtgagcagctttatgcctatctactgagcacctacgatgaagctgaccttaatttagttctttgtccacggcttcacccttgccatggcagcccaaaaccgcttttaccgccccatttctgaacaagatacgcaagccggctatgttgatatattcctctgtccactactggaaatctattccgacatgaaacacagttacattgtagagctgaaatatgccaaatataaggattccgaaagccgtgtggaagagttgcgtcaggaagcaatcacccaagccaaccgctatgctgatacggaaacggtgagaaatgctattggcaacacgatactacataaaattgtagtggtgtataaaggaatggatatgcctgtatgcgaagaagtatagcccgatcctaaaacgacactacatatcttccaaacaaagattcgctatggtcagtaaatatcttcttcatcatatagtagctgaaccactgacaaccagattgataaacgtatcctgccgatacgtatcccacagattttgcagatcactaaatatggaaggattaatattgtaaaatttataaaactcatcaataacaatgttgaacgaacgtttctctcctatctcaacacacaaacaccactaccataagattattctgaagcagtatatctacccactacccttttaaggatatctaataattcctgattaatttgttaaggataaatttgccataagcaagctaccaaaccacacaaaataggcttacatagaagctccatttctctaatcaatattcccacttatcaataataattagataaattaataatcgtctctcttttagttgcttttaatttttaaataatgtatttttgacaaaacaatgtctaactataaactaatacaattatgaaaaatttatgcttactatctttttattgggtggtagtacttttattaagttcatgcaccaaagacctcctttataactatgaagaaaagctaccacagactagagccgttaccaatggtgactattattcattaggagtaacctatgatataactatggactaccttgataatgatgcagctaaataccctgtaatagacataaaggcttttcttgcagacaacaaaaattcttatatagaaaataatacaactgaagggtattccataacctattcaggagcaaccgccgaagacttttctaaagaaataaaaaccaaaaattctataagctatggcggcagtggtggtggtgatactttttctctttctggtagcgtaaagttcactagcgaattagatcagcaatatagttattcaacaaaatactcttttgcaagaggagatgctataaaaagagtaaaaagagtatcattgaatgctacagccacaatgctgcgaaattacttatatcccgaatttattcgtgacttaaagactaaaactcctgatcaatttgtagcatggtatggtacacatgttttattagatgtaacacttggtggaagattacaatttaattatcgttctgttattgatgaaagaacaagtaaatcagacatgaaaaagactgtagaatcaggtctcaaatttgccatgggaaaatatggagccgatataaaacaagaatttatgaccaatgaaattataacttggagtaaaaagaacacttcttggaaaacatgggtaaagtatagtggaggcgaaagtagtggaactagaactaactacgattcagagtcaggttatcttgtaacatccttcgacattgatgcttgggaaaaatctgtcaacaaagaaaatgcagggatcgttggaatcaattgggaaaaaacatatccaatatatgaattgattgcagatgcaacgaagagagaagaaattcgattagcagtgaaccgatatattgaaagtcaaaaaatagaaatactagaattagagcctttatacaatatttataatagaaaaacagggaacaattttaatgttgcaggatatgacctaaaaaactattggctatatgttgaaaaggatggaacatatagggaatgtgagtcttttttaggctatgtgctaaaaaacaaacaattacaaaccgagccattatataacatcaacaacaaaaaagtggaaatacttttactgcaataggcgacaccgaaaagaatatttggttgcatcaagcagctgaccacgaatatcgagagtgtgagtcccaaataggttacgcatacactaaagaaatgcctaatacaattccactgtttagaatacacaataaaaaatcaaataatacttttagcgtagctggaattactgataaatattactggttatatcaggcttccgatcatgaaaacagagaagatgatggacagacaggttatatctatcccgcccaatagccccacagtcacattataaaatatcaacaatatcaatgacaatataatataagaaagagagactctccataaaatgggactctccatcatattgtgtaaatagaaaactacgggattcttctcgtagttttctatttacacaatatgatggagagtcccctaattaatacacatacccccatgtacattgataagcatcactcccctcttgagtacctcgccaatgtgttgataaactatgattagtatactttttactataatatccatacaaaggtgttgtcccaggaacctgcgatgtatagatataacctaatgttccttgataacggtctgtaccagaaatagtaccccgccaattagtacaataagaatgatttacatacttttcactataatattcatataacggggtagtgccaggaagctgtttcgcacaaatatatccaataactccttcataacgatctgtaaggtcaacctcccccctccaatgggtagtataagaatgattgatatatttatcactataatattgatataatgggagtagttcaatcacatcaatctttttactatcaatgtacctaaatacagcctccttcatttcttgtttctttataggatcagaaattagatcataaataggatacgtagcattccagttgacatcaaacaatctagaatgcaggtcatcaactgactctgtccatgctcccaaattaatactaaaacttggtccttgctcgggtgcgagcgtaatagtagtacccgaggtagaaccaccaagagccttaatatagcattcccaattagaatttttcttattgcgctcctctacttccgttttgctccatgaaccgtgagcatcaagcccaatattgctcagattatattttgcccctgcactgacaatctctgttttttccgtactactattctcttctattatagcagatttataatatgcagtatatttccctccaactgttatattagttaaaacatgcgttccatacatttccacaattttatccgcagaatatttatttaaatcttcaacaaaagaagacaacaagtatttagataaggtttcaatatctgtattcagcaaatatctcctttgctttttaaaaacctccgctcttgcaaatgagtattttgaagaatagaaatattttgagcttgttttgaatcccgtcgttatagtccctgagaaaaagccctctttatcctttttctcaggtaaagatcctacagaaccactaaaattcgtatcggttattatctgagataaaaaagattgcgcatctgctcctgcaaaacatctctgatcaattacccctgaaaattgcttatcaaatctgttaggatttgctttcacaaatgcttccacatctaagattttcaaccttgttgaattttcacccatgtagtcatcggttatatcataaccataacctaatacatcatacactccatctccagctgcccttgttgttacatttgataccgaagattcaacatttggtaaatcctccatttttgaacaagaatagaaaagaagcaaaaagcccaataaataacaaaatttcttcatggtattaatatttaaaaattaacaattaccaaaagtaagaatattcaatatttaatccaatttaaaagagtgtgtttagaaacatgaaataataatgcacccttaccttacattacaacagaaaaaccaaccttctgcatgacaaatagttagattacacttattattaaaatgaaattcatgtttataagcatgtttaattaattggatttaatcgtcaatatgcatatcttcgataattgttaaactttaaatattaataccatgaagaaattttattttttattggcagtattgcctcttctttattcttgttaccaagaatacgaagaattagattcatttttaaatgaaaaggtagatcaaattaacacacgaactactggtgatgaaaaatatgatgttttaggatatggctatgacatcactgatgaatatttaggtgaaaatgccgttaagttacaggtcataaatgtccaagcatttgtgaatgatggtgacaataaatatcgatttgacaatccatttattggcattatcgaacagaattgttatgcaggggaaaatgcttactcgtttcttgaagatataagaactaaaactgattttagtggatcggtagcttctttaatagatgtgaagaaagatggttttttctcaggtacagtttctactaaatttgagtctgataaaagatattcattttctaccaaattttcatatgcaaaagcagaagttataaaaaagcaaagaagataccttctaaacacagatataaactcattatccaaatatttaaccccatcattcttatcagatatccaaaaatattcagcagacaaaattgtactcaaatatggaacacatgtcttgacaaacttcactgttggtggcaaatacacaggattatataaatctgctatcgtagaagagaataaccatactgaaaaaacaaaaactgtaagtgcaggtgctaaagctaacttttcgggcattggacttgacgccaatggatcatggagtacaactagcatacaagaaagcaatactaaaaactccaattggcaactttccatcaaatcatacggtggctccacatcaggtacatcaatgaccataagttcaactccaacattcaccataaacttaggagaatggacaaattctgtggatgacgcacattcggtattgatatctgtcaattggaacgcaacctatccgatctatgatctagtcgaggacccagtaaaaaaagaacaactaaaaacagcagttattaattacattaatagcaagagtgttgaagtccttgaaatagttcctttttatcgatattggggaaatggagaacattattttgcgcaagagtatgcccccaaattatggtatgaccaatatacttatgagcaagtagcatgctatttgttagcaaagcaacaaaatggaagtgtacctctaaaccgatactggggtgacggagaacattattacactttagactcaacgccaaccttattaaacggaaaatataaacttgaaggagttgttggatatatttacagaaatcaagtaccaggtactgtgcctttatacgtctattggggaaatggtgagcatcactatgacttacaatatgcacctaaattatggtatggtcaatataaatatgaaggaattactggatatgtataccccatcaacgattagtatgcaataaagagaaaatgccctaaaatgtccctaaaggtactataaaaatattttgtgtaaatatgaaatacggaactcgttctgaatcccgtatttcatatttacacaaaatattttatagtgctgtaattcccgatacagcatatataaaccatagtactcattattttagttcttaaaaggtgggaagtcaaaatttcttctatcacctctatagttcattcaccaaaaccaatattagcaataaggctcttacttgggaaaatgcacaattagctttgggtaacctgagaaaaataccacgcccaatcctttacattcactttattttgatcaattaaatccagcgcagtaagccaatgtgccttccttctctgatcatacaccattagtggtacgacctctttcctataattatagttctccaattcgatatcaatattacaccatacacgtttccaaatagcccatccccaacaaactctaaatcgggaaaagacataagagattaataatggtattgaaacttcactatgcccggctgttatgctaatcctattatcattacgatatctcacaagcatttctctcacaaaaggaaagaatatcagatcaggaatacaattatccccaaaaattactgcttcctcttcatgtaaaaaaaatacaaaatactctcataaggcccatatttacatcctttattcttatctctatacgtaagatgcagttcacagtcccaatcaatttgttttattatatcacgtgttttatcacacatctctttctcctgcagatctctcgacctatcagcaacatataatttctttgactcaatttctttggttcaattccttttaccctttcaaaaactttaatcaccatgcaatatcttaaaaaaaataataaagagacaacacatcgtattccataatcatcccaatttaaatccaacataaagcacacaccgaagatattccaacatcatatgcttcgtttttttttaatgtcggagtaaaggtgtgaaatacaaatttgagtcaaaagtttatcttatatatttcaccattgctgtcccattaaaacctaaaatagttctttgaaatatttgaaatttagttagttacagaggtttttcgattaaacggatttcgatttgcacctttgcttctctaaaaggagatttgcaaatgcataaagataaatacgttttcgctcaactagtgtcattcttggataggaataagttcaactacatagtacgcaagtatgatggcgacaaatatgtgaagcacttcacttgctggaatcaactacttgctttgatgtttggtcaactttctaatcgtgaaagtctgcgagatttaatagttgcgcttgaagcccatcattccaaatgttatcatttaggaatgggtaaaaatgtatcaaagtcatcgctggcacgagcaaatcaagatagagactatcatatctttgaagcatacgcttactacctggttagcgaagcacgccaaaagcgtgttaatcatattttcaaacttggcggtaacgtttatgccttcgattcgacaactgttgacttatgtctttcagtcttttggtgggctaaattccgcaagaagaaaggtggtatcaaagtgcatacattatatgatgtagaaacgcagatccctgcattctttcatatcacggaagcatccatacacgattctaaagcgatgattgaagttccttatgaaccaggctcttattacatctttgaccgcggttataacaacttcaagatgctgtataagattcatcagattgaagccaacttcgttgtcagagcaaaaaagaatctccagtacaaatccatcaaatggaaacgtaggctgcctaagaatgtgttttcagacgcaagtgtacttctctggattctatcctaaacaatattatccagagccaattagactggttaaatattgggatgaagaacaaaaaagggagttcatattcataaccaatgcgatgcatatatctgcacttcaagttgccgaactttataaaaatcgctggcaggtagagctgtttttcaaatggctcaagcagcatcttaaaatcaaaagattttggggtactacagagaacgctgttcgaatacagatatatgctgcaatatgtacttactgtttggtggcaatcattcaacacgatatgaaactggatagaagtacatacgaagtgctacaaatattgagtatctcattgactgataaaactcatctgagagacctctttgataaaactaaatttcaaaatgacaaagaacgattcgggccaaatgggccaagtttatttaatttttaatttgtcccagttttaatgggacactagtgatatttcactataaataaaaataataagaaacacattttctcttccaatggaatatttactacttttgtacacaagaaaaaaaataaaataatggaaaaacgaaaaacaattggttttatttcctatgctgatcccaaagataaaactgcatggagtggcacaatacactacttatacaatagtatagaaaactctggatataatgtaatatggatcaaagctagattttccaaatggatcagacattaccagaaatttctggatcggctctctaaacgttcgaataaacattattccatagcacataccttacttgccgcatacctaactcgtcttgacaaaaaagacttcaaaaaggccgatattttattttctcccggttgtactgctatatataagttaaaaacagacaaaccgattatttacctagctgatgcgacatttaaatctattcataattattatgatgaattttccaatttactctcattcaacattagagaaggtaatataatagaaaagaaagctttaacaaaggccacacatattattcacgcatctgattgggcaaaacaaagtgcaatcattgactatggaatacctaatgataaaatatctgttttagaatttggagcaaatatcaccacacaatcctttaaaaagtatccaaagaaagacaaaactcttcacattctctttttgggaatagattggcaacgaaaaggtggagatattgctatagaaacctgtagaattctaaacaaccaagggattaaaagcatgattcatataataggtcctgtagaagtacctgaaagttgtaaaaatatcccatatattgaatttattggtttcttaaataagaacaatcaatgtgattatgaaagaataattcaatacatgtcatcctcggatatactacttctgccaacccaagcagaatgtgccggtatcgtatttgttgaagcttctgcctatagcatgccgattttcacttacgacactggaggaatttcaaattatgtaattaacggaataaatggctatcgtttgccgttaaaaagtgattcttatgaattcgcatcaaaaatagaaaactgtattaaatcaggcgaacttagtctaatgcaagaatatgcagccaatttatacaaagaaaagctcaattgggctcattggtcaaaacgttttaagaagattatagataatatataacaataattcgttaagttttgaattaacaaaaagaagtaggttaagctctgccaattcatcaaattaaggattactacatctttaattccaatggagacaacagaacttgaccaatatcttgagattataaacaactttagcaaaatcccatataagcaaccgcgttgctatcgcctttgatccgaactatatcagtaaatctttatttccgttatctgaccaaggataagcctaccagtgacaaagaatgccccaaacgttatgaaggcaaaatagggatggatcgcctaaaaaagagtgttttgagactacccggttgaaggatgggcaagaacgaatactttctgcaatcgttcattcctgttcgctgaagaaaaatgtccgattgtgtatttgaaaaagtaatgataaaaaagtacgcaagttgtatttctctaacgatacacaaatgaaaattctgaatgtgttagattattacagaactcgtttttaagtcgaatttgctttcgaaaaacaaaataacttacaggaataaccaattatcaaagtcgcaatttggataaactccatttccattttaatgcctcactcaccagtgtaaatctggctgaaacaaaagcttttgggaagggagctatcttatcaatggcgtctgtaaaagtgctgtatcataacctttttctcatacaacgatttattttcatgttagggaacaagcctgacgaggaaacaaatcgaaggttatggaaagaggaagtgaagcttgcagtgattgcctcataaaaggttaagtgatgcattttttaacatataaatagaacagtatgtcccataaaatccatattattgcaaaaaatatataccccttagttcaatgcagaaaatatttataaaactactaaaaaaactacgccaacgctatactcagaagcatgggatgccacagcattacagtccgtataaagaaatagatcctaatatcatatcaagtcgaattagagaaattttatcatcatcaaagccttgcatgttttcaagatttggttcagtggaaattggatgcgtaatcaactatttaggcatttttcatcaaaaaagggaaattataaagtatataagaggagaggcatttccttggtggtgggaaaaggacacaatagatgcaatgaggaacaatgcaggatttttttctgcaactcccgatcaattaaagcgattttcagagatgatgattgaagatatgccactgattgatatacttgcttcttggagatatgaagaacaatatttctctaatgaattacagaatgcatacaaaattgattttgaacctttcaatcctttctggagcgatataccttggacagctgctttggaaaaacaaaaagtattagtggtacatccttttgcagagactatacaaaaacaatatctcagaaaggaggtcatccacaaagacccaaaaatcttaccagcttttgatttacaaacgattaaggcagttcagacaatcgggaatcatatagatagtagatttaacacatggtttgacgctcttaaatttatgaaaaacgagatagataaaagagagtacgacatatgcctattaggttgtggagcgtatggacttccactagctgcacatattaagcgaacaggaaaaaaagcgatacatatgggaggtagcctgcaattacttttcggaataaaaggtgccagatgggaagatggcaattacaatgcaacttataattatgcacagctaatgaacgaatattgggtaagaccttctgaagccgaaactcctcaaaaagcccgacagatcgaagctggctgctattggtaacaaacttatgcccaatcaaaaaatgaaagaaccacaaataatatttgattctcagatatttgattctcaggtattcggaggtatctcacgatacttctgtgaaataattcctagaatgaatataacattcgatatatcggtacgatattctgaaaatatctatttgaaagagtctaaattgtgtaagcatcgcctgcctgttccaaagtggatattcaataaatacaaaaataagcttctccggaagaatcgaaaattctccgagcacatgcttatatcctcttctgaatatctgctgcatgcaacttattacgaaccgtatttcctaaattggataggaaacaatccttatgtcattactgtacatgatatgatttatgaaagattgcccgaattcttttcaaaagaacaaaaagatatcatattcgagcagaagaaacaggttatcactcaagcagatagagttattgcaataagccaaaacaccaaacaagacataatagatttactgcatatttcaccagaaaaaatagacgttatttatcatggaacaaatatgcagaagcctattcaaaaaaagtcagcaatacttccccaaagatatatcttatatgttggtaccagatatccctacaaaaactttgatcgtttcatcaaagccttttctttattgtcatcaaaagacaaaaacttatacgtaatatgtaccggtagccccttttctatgaatgagaaaaatctatttgaatcactgaacatctccagaaaagtaatgcagattcaagcttctgatgaattactatataccctatacaatcaggcagaagctttcgtatttccatcactttatgaaggtttcggtattcccatcttagaagcctatgcttgtcattgtccagttatcataagtaatactagttgtttccctgagatagcatcagatgctgctgcatattttaatccatactctgaaatggaaatagcagataccattgcaaatgttatatacaaccaaactttgcgagcagaacttatatataaaggttcggagcggcttaaattatactcctgggaaaaagctgcgcttcaaacaaaagaagtatatcaaaaagtaatgaataataagattatataagcatggaagtaatcaaaataaatattaccactgtaaagggctaactcaaacgcttgacaatttatcacaccagattacaacaaacacgaacatatcattcgtagcctcaaccgatggaagtaaatcctcatgttagctactgatatatgaaaaagacgaaatcttttttttacaataaaacgaacaaaaacatcctatacatttaagggaaacatctattatttcttaactttggaaattatccagagaaccctatttagggctacatatagaataatcaggctcttacagaaaatgggcatttcgttctttcttcttagaaaaaagttgattaactttcaataagaaagcgataaaaggctttactctatattggaaacgacgcgttgcacttagttcacaaaaaagttcatacaagggttgtttccttatatatgcagcggactgcaaagagtcaagtagcattcctggaaagaaatgtagcaaaacttgttctctctctttattacataaatttaaagattgagaactaactccacttgtatcaaagacgcttatagtcctttctacatgcttataagaaacagcctccaaaactatctttttcacaaagaactcccagtccgacacaattttaaacgattctgaataaagagaatcttgaaataagcttctctttataaaggaagcaggatgtcccaatgagcgttctaaaaaataatcaatattcagaacattcggatatttaaaaacctctcctttaccagcactatccataaaaagcaaatctccataaataatatcctccttaaacaatagctgcaacatatcttccaaaaccaaagaatcatgcaaataatcaccagaatttaaaaataacagatattctccggtagctttcgaaagacctttattcatcgcattatagatacctgtatctttttcagaacaccaataagaaatatgctcctgatattgcataataacctctttgctcgtatcactactccctccatcaattacgatatattcatattcttgattggtttggtcaacaacactttttatagtttttcgtaaaccttcagcattattgaaattgattgtgataatggataacttcatcttatttctttatatagttatggaaaaattttctataccatttattcttatggcgtatccttttttctcgtaaatcatctaattcacggagataatccaatatacttcctccaaaataagaagtatatatagccctgtttttagaataaatataaaaatctgtttcagcaagaacgtctttttgtgttgctaaggttgttaatgaatactttttgattcgataatgaaataaaggaagaggaatttgataaacaagcccatctccatccaagagccgaatataaaaatcccaatcttcatgtcctttgcgcatattctcgtcataccctccaattcgcacataatcacttttcctaaaaaaggcagaactaaaaatcgcatttcgcaaaagaagatttttatatccgctataacgtaaatcccaaagtccaacagtatctccaaagaaaaagccttgacaatagacgagcttaatagaaggattcttgtcaaaagtatctatggctatttcgatatactccggctttatcaaatcatcggcatcaagtggtagaataaattccccttttgcatatttaattcccatatttcttgcagatgacggacctgcattttcttcacacagatatttaattcttttatctttctccacatatcccaacgctacattttccgtatcatctggagaaccatcattaaccactatagcctcccagttctgataagtttgttgcaataaggaatccaaagcctcagacaaataaattgcttggttataacatggaataactaccgaaacaagaggatgatcttttttttccataaattagaattcaatattttcagtttactaaaatctactttttttattagcatgcacaagaacacttggtcgtattatgtgcctacataattatgataatcataaattgaaacttcataattaatagtattcttacactaattcagctacagaatttggttataaacagccaaacgcctatctaacatcttttgcgggctatatagtttctgcaactgttccacagcctgatttgccagtttaacctgcaaatccggatcaccagccaacctaataacagcagaagcaaattcaagcgcactatcagctatcaaacactcttcttcatgatgaaaattaataccctcaactcctttagtggtagtaacaaaaggagcttttgaggaaacagcatccaatattttcatccgcattccactaccgatacgaatagggacaagtactatgctaccatttagaaaattatgtaaatcctccacataaccaaccaattccagttcaggacaagacatttgaagctctcttacatatgaacttttccacggtcccaccacctgaaaagtgaaatgaaaaccctgactacgcaaacaaggagcgatcttctgacagaaccaaacaaccgcatccaaattcggataatgtccctcacttccaacaaaagttaatctgaaaccggtaggaactacttgtttgtcgcaagcatcagtcatcggcacaacggcaggtgacacatgtattctattttcctctccaataaaatcaatcaatatctgacgatccacctcagttaaaacaatcacatgcttataagtttgtaaagcagagtgttcaaaatcttttccgatacgatacaacatacgctcctcatcggtcactctatcaagaaatgtcatttcattttcattgcggatgtatcttaattcatgatgtacaaaaatcgtttgtacaccctccggcaacaaataacctaaagatatcaatgggtaaaactctacctgaataatatcaaatccactcctggaaacagtcgatatatattctgcatattttgaaggaagtggttcaaaaattgaggaagttagagtcatatcctgacgtacaacatctttattataagcaaacaactgacgatgcatctttcgggtagcagatgatgcaatctttttcaaccatttataataataaggatgccgagtttcaggctcattcatttgctcagtaaagatataaaaattcacattatgccatatttttttcaactcttctacatcttccttttcttttcccttaggatagagtagtatcgacacagacatcttgtcgcgaagatagtctaccatatgaaaaaaagcctgatttccaccagtagtcagcggataaggtatacatggaataataaaaagtattttcttcatctttatctttttttattcagttttactttacacatacggaacgctacactcaaagcgacagacaaatgaatcctccgcaagatacagcatattttccaaagttcacatagactaaatttatcgcgtacagaataatgtaatacggtatgcacataggtcttcagagcatgccccaacttcttttccttaagtttatccggataataattagctatccattttaagaacaacccggtagattcaattttccgactatcatagcaattggaattactaatattttcaccttccgcattcctccaacaaacgaactttccaggcaaagcaatgattccccctgcacaatctgcaaacttcgtccatgttgcatcatccgagcaccaagctaaaggaaatttgacaaagccacctgctttccgataaatatcacggctaaacacatattcacaagcagcagaatagattctgccttccaacttatccagcagaaaatcatatccggaaattttttcacccacaaatgtcgggttctcatgtattacattatcctcaccatctaccactgcgagcgggaaacggaacataacattcttgtcaccacatttatctaaagccttcattatacgctccaccccatcgcacggcattaaatcatcatcagagaataaccagacaacaggttctttagacatatcaatgcatcgttcccaatgcccaggtaaatcttgtccacccaagttcgtctcaaaacgataataaacaatatctagtttatcctgataaaggtagacaatatttttcaaatcatgaggactggcatcatctcctatatatacagtaaaatctttatcggtttgtgctgctacagaatccaaagtctgttgcaaaaagcgacttttataggctggtatgatgattgctactttcttttccataaaaaatatgattcaaccgatttactttctcccaatatacttccgaattacttccagataaccttttccatagcgcaaatccggctccagataatttccttccccccactcattccatgacttcacaaaagcaagacgatgctccaaaggtttattttcaatacgtgccatcacatctttcacatgccggtcaaaataagctggttctgcatgattcaataccaatgccttatttaaagaacgaggtgaatgatcccaattgggaatgattgttggtataatttcaggggcatactcttcatctccaacaaaaaaacgactcactctcttgtactccataattttaggacaacgaaaaatccgatgcctccacttggcacatttataaagaaactttgctttcttttcaaaatcaaacaaacgtgttacattaatagcatcaaatcccatatccatcagttcggctctttcctccgtcaaatgatatgtttgacctatgaaaaaaatacctttcagaccattattcatagctaatttctgccacaaagccataaactcttttatctgcggatgttgaaaaggctgataaatcatgaaaacaggtttatcatctactgttatgtaacgaggatctttaaaagcaggcaacactgtttcaaagtgagctatataatcatcttctcctggataaagttgggtaatcaacgcctgtttggtttttactccatgaaaaaagcctttccacgactcattggcccaagctaggcaaaaaggaaaatctggcttaccagaagccaatacctcattaaaaggacgttctaataatcgcttaccattcccaaaccaatagtgccaatagcaaaatccttctatgccgtattctctcgccatatcagcttgagcctgacgagtctcgggaactctcaagtcataataacctaagtctgccggaactttaggctgataatgtcccggaaataatgaacgtgctttccctacattagtccattcagtaaaacccttcatccaccattcatcattttcaggtatcggatgaaactgggggagataaaatgcaataactcttgctttatttattgtattcattatatcttaatttcctttagtaatctattattatgcttgaggtatcttcttcccagacttaaaaaataatttcatcgaacgataaacattcagattttgatatagcagacagcgtttcaaaagaaataggaaatccacttgaggccatcttacatccttaaattcctgcattttagctattatatcttttattatggaatcaagttgtggagaagaaggaagcatgaggattttatcaatcgaatgtattccatatttatgcacataacgaggtgccttatgccatattccatttgcttgcacaaacttcacctgctcatatatccgcaagaaccacaaatattctttttgtggatcatactgcttatccagaactgtactcccctcacgacgcaaataatgatatttcggacaatcttgcatgactatccggcgtaccttatgaaagacacggtagcaaacggccatatcttcaaatatctgattttcaggaaagcgtattccagaaaatgcttgtcgtttaaacaatttatcccatatataattccttacccgcttatcaacaactaaggctcgtatggcctcatcacttgaaaaagaagtgagtgtccccgatgaatagcgtactttagtccgggtagtcgtctctatataatgagcacacacggatatatctgcatcattatctaccaacaaatgatatagaaattcatacatatcaggatcaatccagtcatcactatccacaaaaccaatatattcgcctcgggcaatggtcaatccttcattcctcgcacaactttgccctttgtttacctggtgaatcactttgatccgactatctgtttcagcaaacatatcacatatttctcccgagccatcagtagacccgtcatccaccacaataatctcaagattcttataggtctgtccacagactgaacataaacacttttccaagtattcgtttacgttatatactggtatgataatacttattaaaggcaaaccttccatattactcactttatttgcagacaacgtattttcagaagcgatgactttttgacttaaaaactgacctaacaaaacgatagaccgaacgatatcttgaaagattatgataaatagcccaacgtttcacagcaatagccatcccaatctgtcgaaatgaaatatcatcgtactgatgcattttattaagcacatctcttactatttcttctacaaaaggagaagaaggcacaagcattatatgatccataaggtgtactccactccgaataataaatacaggagctttatcccataactctttctcctgaataaaagtacattgttcgtatacagccagaaacatatgatattctttttcgggattatacttgcttcctgttatactattagtacgcaccatataatgatacttgggacaccctttcattacaattttccgtgcttgataaaacactttgtacatgacagctatgtcctcgaaataacgcccctgcggaaacctcaattcataaaacaaagtccttctgtagagtttatcccacgcaaaatttcgaataatatcatcttcaactaaaagacgcatagcatcgcaaggcactagattcaaaaccttatccgagctatattttatctttgtcctacccgatttttcaatataatgtgaacagatagatatatccgcttcttctgtttccagcagttcatacaaaaacttgaacatatcaagatcgatccagtcatcactatctacgaaaccgagaaactctcccgtagctgcatccaaaccttcattccgagcagcactcaaaccgccgtttttacgatgaattacctttatccgcctatcttttgaggcataagcatcacagattttcccagatccatcagtagagccatcatccaccacaattatctccagattggtataactctgtccacagatagaatcaagacatttctccacataatctttgacattatagactggtactataatgcttattaaaggtaatgctttcgtttcatccattattttctttatacctttcgtccttctttcacgattccattctcacaccaaactatcctctctgcaataacctgcctcaacacctgttcgtgatattccaaattctcccgtgaagcaaatttatgataaagatggaattgcactccacccatcttcaattgtttcttttgaatacctgcatggataaggcgataggaaatttccacatcttcctgcccccacatctccaaagactcattataaccattgacgcgcaataagtcttctttccagaaagccatattacagccccggattcgcagcatgctattcttagcataacgatttgccaaatacaaacgtaaagtgtgtgaacgaaaagcgttcaacaaaaagctaaggtcttgtttaaaaagtgcaggatgagtttccactcctctaagtaatcgggcagtagccattcttcctaaaagtacacgactcccacacacaaagtaacctttttccgccaattccagatggtccgcaataaaatgcttatccaagaggatatcaccatcaatctggataatataatcccccttcgccctttcaatagagcgattacggatggcagaaagacggaaacctttgtcctcgtgccatacatgcacaataggaatatcggtctttgtccgcatcttatcaatcagctgcttggtgtcgtcacgtgagccatcatctgcaatcagaatctcacagggcttcacggtctgagcaaaagcgctgtacagacatagggacaaggcctctttccaattatatgtagatatcattaatgagactaacatgtatcaattctttaattcaacttcattttttctgatcttccggccaattataatctaattcagcctcacgttgtagcgctgccctgataatctcacttgtactctctattattttcttcttaatgcctgtagtgcttacatcgggagtataaggaaaatacaccacttccttaccgggctgttgcttcatccactcaagcccctccagatacttatttatccaatcatcccctatggttactatatcaatatcctctctctgtaattgtgccacttcagtaagcttcacttgcttcacagctttagtcacacacttcaaagacgaaataatccggaaacgttgttcaaagggaataataggcggcattcccttgtaatgctgtatcaactcatctgtgcttacgccgactataagttcatcgcccaatgccgccgaacgttccaatatgttcagatgaccgatatgaaacaggtcaaaactaccggatgtgaatactctgattttctttctttccatgctatatagatttatcggtattctatttctttaattctcattgccagatcatccagatcctcttcactttgaactcccaaatgggaaaccctgaaataacaaggagtaccacccggcataatgaatatgtcttgcttcaacaattcattaaagagaatatctccattctggcgaacaaagaaccccgtaatgcaattggatggcacttccgccggaatttcccaaccattctgcctgcacagctcacgaaaatacagcgctttagcacgcacggaagcaatgattttgtcaaccccaaggactacattctcctttaaacgggcatgcaattgcataaacaaactggtggccggactgtaaggtgtctgaccgcgttccagattcttcagattctcagcaaaatcaaaataataagatttatgcaaaaaatcagtctgcaggattctaggcgaaagaaacagaaacgacaaacccggggctatattcagccccttctgactgctggtaatacagatatcgatattcaactcttccatatccaaatcatcggacaagaaagaactaatagcatcaacaaccagcgaaacattatgtttcctgcaaatagcagaaattttctttaaatcaaacagttgaccggtagaggtttcatgatgttgacataaaaacacatccggacgcgaagcagccacagcattttccagctgggcataatcaatatcacgagcaaaaggaacttcaaaaacttcattctgaacctgatagtactcgcagagactcttccaacggtagccgaatgaaccgccggctataataaaagctttctttttcagggaaacataattggtaaccacagcatccatcgcaccggttcctgaagcagtatagaagataacacgcccgcctggacaatgtatcagttccagcaacatacgctctgaatctttcacaatttcagaaaacaaagcagtgcgcatatacggaaaagactctcctgcgattcgaagaatccgctcttctatatttcccggaaaaacataagatttcatattcctgctttttaatagttctacattacttttcatcacttctttatccttccgaacgtctttatactcgtatattttctccaaaggttcaacttccgttctctcggaacaccatgacggcgaatataatcttcagccgcttccagcattcgcctggctacatttccatccagatacggatcgtagttatcaaccacccatcgtcttttcgcaatagcgttttcatcatgctgcacactttcaaaggcgtctgtcaattgggatgtatccgttatgtcagtccagtaaatgtccttcgctatggtgcgataagtaattaccggacgtcccagaagcaagaattcatatactgttgaggaagtgtcacttatcatgacatcggacattaactgatacttcgtaacattaaagccgtcttcccatataatgtgttcttcttgttctgccagttgtttatattcatccacccactcttttttagtcaacggatgcaacttcaacaacagaacgacatccctcatctttactaaatgcagcaaagcctcttttaatgcaggaagagatgttaaacttggtgaaaaagttggtgcatataatacaatttgactttttccatgcagtttcaacagttcttcacgttcccggtcaaaatcatgccaatgattttttatccaatcttgtttgggccaaccggtctccacgacctcaaaatctttatattcggcagctaattccttaaactttttcgtaaaaaaaggaccttgggtgaaataggtatcaaaatagcgacgaatgacccaatgatctttcttttctgccgcatagccatgaaaaacctgtatcttcacacccggcaaataatagggaacaatattgcccggcacaaatatagcttccggagaaaaatcataaacctcctgcatcgaataggtgtaaacgacctttccgtccagtgggaaaaccgggatcttcggaagatgcacataccacaagatatgattcgtctccgactttaccgcttcctgatatataggcaataatatatcaacagcatacttattttcacagaataagacaatacgcatacttctctctatagctccagtttatacttcacttgatgtttctttgcaaaataaatccagaacttcttccggtgtgcaagcactttatcaacgcagtattgttcatcagcattgcgtgcccgtgcatactctctggcaagtaattcaaaaaaggctttctgtccccataaacgggcaaaattggcacagcccatatcgatactgatcttaccgaagctcatgcggttaatatccactaacataaaatgatactcaccatctatcttatcaaacagaatatttccgggagaataatcccggtgcataatatcagattcatgcagacgagccgtataacgggcaaaggctataacaacatcccggcaatcgttaacatcggcattgccgaattcataaaaatttcttcgataggaagattgaagactgataaaataagagtacttgatcaagccccacttacattcttcgatataagcgataggaaccggggtttcaaagcctctctgaagcagtatgttgggatatgaaaaggcgcgccttcctttcggggcacgaaaaaaagaataagcaatccgatttaccaaagccggaactccataacgttttatattgatctccaatccatcatccaccgtcatcactttgatgaggtttcttccagagtagatcaccctcccctcactttcaaagatatcaggaatgctttctacaaatttccgcaaatgctcgtatgcaggatttactattattttcatattttactctgccttcacctttttagacggtcccgtcattctaaaatatttatccatcatttaccttatattctcttcaatcttcgcaataatttcttcaggttttatctctctcaagcaggcataatcgccacgccagcaaggcttctgcccgtaaaccgaacatggacggcaggataagtcaagttgcaccgtattggccggcaactgtttccagcccatgaatccggcataaggatgcgtagcaccccatacagaaacaacaggcacattgaccagagatgccaaatgcatattagcggagtccatggaaagaatcacatccaaatgactcatcagattcaattccgtatccattttcagcttaccaatcaacgataggacggaaggatacttagcggtccagtggtcgaatacctccttttcactcttccctccacccaaaaggaaaactttcacatccggcattgcagcaaaataggcaacaacccgttcctgctgttctatcggataaatcttacctttgtgtttagcaaaaggagcaatacctatccatttattattccctttcggtcctaccaccggctctatttgcgaaaagtcacctttcccttctccgtagatggaagtgaacttcaattgaaccggaagccccagcttttccagtacatcagcatagcgccggaaagaactttcctgcttttcaaaaaccttatgatgacgacgaaccagtttcttcttacctgcccgccccttgcatattgcagctacaggcacgccatccaaccgaaaacgccatcgtaagtatttcgcgcgaagtatatcatgaaaatcggccacataatcaaaatgtagcccttttagttctgcatacagactgtttaatcctcgtaatcctttatgttttcccgacaaatcggcaccgtaaaagcttacattctccggcaacttcagaaaaagaggttgcaatgcagtacgactcagcactatgatttcatgctgaggatattcggctgccagcgaatgcactaccggaaccgtcatggctacatcgccaagcgcagagaaacggataatgaggatacgtgccattcgttatctttttgcataaagcaccggattcaaggccgggtcattatacatcttcatctgtttatatactttcatatatttttttccggattcaatatcagccagcaattggtcaatggccgacgaaagatcttgcttttgttccagaaggatatccagtttagccttgcattgagcatgatgttcgggagtagtatccgtacgttccacctccttttgcatgtgatagatctttaatgcaagaatagaaagacggtctatcgcccatgcgggactttccgtattaatggtagcctccgccatcggtttcacatctttatatttatccaggaaatagctatcgatcagttccaccaagtctgttctgtcctgattagacttgtctattcttcgtttcaaagttaatgccgcattcggttcaatctgcggatcacgtataatatcttcaaaatgccattgtacggcatcaatccaattcttcaaatatagataatactcaatcgtcttcaactcgtaaggattgttcattggcgcatccacgctatccgttacatgataatccgcgactgacttctcaaaaatgctgttgcaaaggttactaaatgccataatcttaacgaactttacagttatacaataatacaaagttatgcaatatttcccacacaagcaaccgttccccactttttattcccatcttgctccaaaagcaaaatatcctcttccttatttatttcatatttttactaccccataacacctccaataagataagatcaaagggttcgtatgaagaatacgttaacaaatcaaagcaactttcataagaaaatagaaaccagctatactttattactataacataaccccatacatataattaatttctaaatttgcctgtattcaaaaaaaacagaattccatgaaagttattgttgacaataaaataccttttataaaggaagctatcgggaaaatagccgacgaagtaatatatgtccccggaaaagacttcgcccctgctttagtgaaagatgcagatgcactaataatccgcacacgcactcaatgcaaccgcgaattactacaaggaagccgggtacaattcattgctacagccacaatcggcttcgatcatatagatacggagtattgccacgaagcgggcataacctggactaatgcaccgggatgcaactccgcttccgtagcacagtacttgcaatccacactcttattaataaatctcctgaaaggaaaaaacttatcagaaatgaccattggcattgtcggagtaggcaacgtaggcatcaaagtggctaaagtggctcgcgaattaggtatgcgggtattgctgaacgacttgccacgagaagagaaagaaggaagtactaacttctgctctttacagtttcttgccgaagaatgtgatgttatcactttccacgtacctttatataaggaagggaaatataaaactttccacctggccgatgaagcattcttccgttccctcaaacgttctcctatcatcatcaatacttcccgcggagaagtaatagaaacagcagctttattgaaagctcttcagaccggtctgatttccgatgccgtcattgacgtatgggaaaacgaacccgacattaatctcaccttattatataaggtattcatcggaacgccgcatatcgccggatactcggcagacggaaaagcaaatgctacgcgaatgtctctggactccctgtgccgacacttcggcatacaagctgactatcacattgctccacccgaaccggaaaatccgatcatcatagcatctacccctacagaagcctatttaaaaatgtatgatccgcggaaagactgcgaagcgttgagagctcatcccgaactatttgaaaagttaagaggagattatccgctacggagagaaaagacagcattctccgtaataactccgtagcttagccttcggattcaagcaacttttctatcactttgggataagtgtcatattccagcgcatgaatacgatgcgccagatcatcaggagtatcttccggcaacaccgggcatttcacctggcaaataatggcaccctcatcataatgttcattcgtataatgaatagtaatgccactttccttttcgccggcagcaatcacagcttcgtgcacgcgatcgccatacatgccctttccgccaaactttggcaacaacgaaggatgtatatttatcattttattaggataagcatgcaaaataagatccggcacgcgcgccagaaaaccggccagcactacaaaatcaatatcatgctcccgcaacaccgataaaatcgcctctccattctcccagtcactcttcggaaaatagaaacaaggcacttccagcccgcgtgaacgctctaaaacaaacgcattctgacggttagttaaaaccaaagccacacaagccgaacttttttcccggaaataacggatgatattttcggcatttgtgccgcttcccgatgctaatactgcgatatttttcctcatatttcttccttttagtgcacaaaaccgtgaaaaatgtgcaaaacattgcatttaattccctaaatatttgcgagtgacgataaatatttattcctttgccccgcaaatttaaagaaataaaactaattattaattaaaaacttaaagttatgtctgaaattgcatcaagagtgaaagcgattatcgtcgacaaattaggcgttgaagaatcagaagttactaacgaagctagcttcacaaacgatttaggagctgattctcttgacactgtagaacttatcatggaattcgaaaaggaattcggtatctctattccggatgaccaagctgaaaagattggtactgtaggcgacgccgtttcttacatcgaagaacacgctaagtaatcctatccatcaatttaatatggaattaaaaagagttgtagtaacaggtctcggcgccattacccctattggcaacaatgtttccgatttttgggaaaaccttgtgaatggggttagtggagcaggacctattactcatttcgatgcttcccttttcaagacccaatttgcctgcgaagtgaaaaacttcgaagctaccaaatatatcgaccgcaaagaagcccgtaagatggacttgtatacacaatatgccatcgccgtcgcaaaagaagcggtcactgattccggtcttgacatcgaaaatgaggatttaaacagaattggtgtcatctttggcgccggtatcggtggtatccgtacattcgaggaagaggtaggtaactatgccttgaccggcaaagaaaacggtcctaagttcaatccgttcttcatccccaagatgatttcggatattgcagccggacagatttctattatgtatggttttcacggtcctaactatgcaacttgttctgcatgcgctacttccacgaacgctattgctgacgccttcaacctgatccgtctgggcaaggctaacgttattgtgagtggtggttcggaagctgcaatcaccgttggcggtgtaggcggtttcaatgctatgcacgcattatcaacacgcaatgaatctcctacaactgcatctcgtccgttcagcgcaagccgtgacggtttcgtgatgggtgaaggtggcggttgtctggttcttgaagagctggaacacgccaaagcacgtggtgctaagatttatgcagaagttgccggtgtaggaatgtctgccgacgctcaccatctgaccgcttctcatccggaaggacttggagccaagttagtgatgagaaatgcgttggaagatgccgagatgagccccgaggaagtagattatatcaatgtacacggtacttctactcctgtaggtgatatatcggaagctaaagctattaaagaagtatttggtcaacatgcatttgaattgaacatcagttcaacaaaatccatgactggtcacttgctgggcgccgccggtgcggtagaagccatcgcaagtattcttgcgatcaagaatggcatcgtacctccgactatcaaccacgaagagggtgataacgacgaaaacatcgactatgaccttaaccttacgttcaacaaagctcaaaaacgcgaagtgaacgtagctctgtccaatacatttggatttggcggtcataatgcatgtgttattttcaagaaatacgcagaataatcagtcgtgttacgtaatcaaatagacaaaataaggctcttattccgtaaggacaaagagtcttatttttgtttttataagattctggggttctatccccgcaacattcagctctaccagcaggctttgttgcacaaatccacctccatccgctctgaaaagggacgccctttgaataatgaacgactggagttcctgggtgacgccattcttgacgccatcgtgggagatattgtctataagcatttcgaaggccgtcgcgaaggttttctcacaaatacacgttccaaaatcgtgcaacgggaaactctgaataagttggcagtagaaataggcctggacaaactggtaaaatattccacccgttcttcctcgcacaatagttatatgtacggaaatgctttcgaagcatttatcggtgccatctatctggatcagggctacgagcgctgcaagcggttcatggaagaaaagatattcaagaattacattgacctcgacaagatgtcgcgcaaagaggtcaacttcaaatcaaagctgattgaatggagccaaaaaagcaaagttgaggtttcatttgaacttatcgagcaattccttgatgaagattataaccccatgtttcataccgaaatccgcatagaaggtatttcggccgggaaaggaaccggatactctaaaaaggagtctcagcagaatgccgcacaagctgccctgaagaaaataaagaatgatgcttcattcaaagaacaaatagaagccacaaaagcgcagaatcatttgcctgagaatacagaagaaacagatgaactcacagaggagactctgattgaagaaaatcttgaaacgattctgcctgtagaaaatcctgaaacggacgaatgtaagggcgaatagccttcgcccacatcattatcagccgaaacaaattcccatccggcgcccttgaacaaccagatcattatcctccgttaccagtttcaactttccggcaatttcctccagtggtgcagaagaaatctcatcccctttcaacgtaatcatccggccaaactgttctgttgcaatcagttccgtagcatgcccacccatgcgggtagacaggttccgatcgaaaggtgtgggcgaacctccccgctggatatagccaagcacagtttcgcgggtttcaatgccagtttcatactctatctcctgggcaatgtattcagcggcacgtttccggccatccgtctgtatgccttcggcaaccaccacgatggaataaggttttcctttcttcagtcggttcagaattgtctcaccaatattatggatattataaggaatttcgggtatcaagataacatcaccgccacctgccatacctgaatacagtgcaatccagccggccttatgccccattacctcgatcaccatcacccgtttgtgcgagctggcagtagagtgcaggcggtcaatggcatccgtagcaatacttacagccgaatcaaatccgaaggagaaatccgtcccccagatatcattgtcgatagtcttaggcacagatacgatgttcagtcccatagcagccagtttggcagcagtcttctgcgtaccgttaccaccgatacaaaccacacaatccaatcctaattccttgatattctgttctatcaatgccggtttattgacatcggatatcacaccgttcttcttgaaaggtttctcgcgggaagtgccgagcattgtgccgccctgattcagcaaaccggacaaagatttatcagtaaacgactccacatccttggtaagcaacccctgaaagccactatgaatgcccacaacttccatcccgtaatgattgattgcagttttgcacactccacgaatggtggcattgatgccgggacaatcgccccccgaagtcaaaataccgattctcatgacacttttgtttgaattattgttctttaggtccgtaaagatagaaaaaaaagagaaaaaagatagagaagccgataaataagattatttttgcgcaacaaaatagttttaactaagagagatgaatatcacaacattgctggataaggtgtattttgcccctcgcctgaaaaaaatcgacttctatgctaaccgcgcaggagaacttcaacaccgagttcttgaccgcttagtgcgcatggcagaaaatacagaatggggaaagaaatatgattataaaagcattcatacttatgaagactttagaaacagactacccatacagacttacgaagaggtaaagccgtatgtggaacgactgcgtgcaggagaacaaaacctgctttggccttcggagatacgctggtttgccaagtcctcgggcacaacgaacgataaaagtaagttcctgcccgtcagcaaagaagcattgaatgacacacattatcaaggcggtaaagatgcggttgccctctatctgggtcagaatcctgacagccgctttttctccggacaaggtttgattttaggtggaagccacagccccaacctcaactccaggcacgggcttgtaggcgatctttctgctatcctgatacaaaatatacatccgttagtgaactgcgtccgtgttccaagcaagaaaattgctcttatgagcgactttgaaaagaagatagaagcaatcgccaacagtgccatatcaaaagatgtaacgagcctttcgggcgttccttcatggatgttagtactcattaagcgtatccttgaaaagaccggtaaacaatcgctggaagaaatatggcccaatctggaagtcttcttccatggtggtgttgctttcaccccttatcgtgaacaatataaagaagtgatccgatcacccaaaatgcattatgtagaaacatacaatgcctccgaagggtatttcggtacgcaaaacgatccgaatgatccgtccatgctgttgatgatcgactacggtatattctatgagttcatcccattggaagatgtaggtaaagagaatccccgcatctactgcctggaagaagtggaagtggacaagaattatgcattggttatctctacttctgcgggtttgtggcgctatatgattggagacaccgtgaagttcacgcaaaaggatccatataaattcgtcatcaccggacgtaccaagcatttcatcaatgctttcggtgaagaattgattgtggataacgcggaaaaaggtttggcaagggcttgcgaggctaccggagcattgatttccgattattcggctgctcctgtatttatggatgccaatgctaaatgccgtcaccaatggttgatcgagtttgtacaggcaccggacagtatagagaattttgccaaaatactggatgatacactgaaagaagtgaattccgattatgaagcaaaacgacagaaaaacattgccctgcaacctctggaggtgattgttgcccgcaaagacctattccatgactggctggcacaaaaaggaaagttgggtggacaacacaaagttccgcgtctcagcaatacaagggaatatatcgaggaaatgctggaactgaacaactgattcctgcaatagcataggacaatacgataataaataagaaaggccgcatcagacaaaaccgatgcggtcttttccatttttgttccatgccttgaaactcacagtttcattacttgaaaccaacagtttcatgccttgaaactgcgagtttcacgccgagaaaccagtagtttcacaccgagaaactaacagtcatcccaggctatcagaaattataagccaatccgatacccagtatctccttgaactgtaccttcggccctctttcaacgccctcatcattaaaggttttcacatcattatcatacttcagtgtcatattcagggttgctgatagcactttattgatcttcatactgatgagcacatcccagttgacatccacattaccaaagtctttattataaggagtgaagaaatcggctgtagtaatcagattcacattttccatgacaggcagctctgcacgggctttcaggaaagctccggcttcgatcttaaagtgatcccccggatcaacaccaaaagaacctaaatcagaaagataatcatcgctcacaaaggtcatctttgtggagacaggtgaaaggaatatagaataattactcttcggacgatattccatacccaatgccacattagaataggcgggagcaaagaagttagatatatagtgactcttgtccggataattatatcctttggcaaattgagtattcaagtcagccataagcgtataataccaaactttagtggctgcatagcccaactgggtagataatcctattttatcagaactctttctcatcccttgcgatttggttttcgaaagaccataatccagcaccaggttcgtcacccatagccagtttccgctcttatgtgtcagtgacccattcaggtaagcatttccggcaatagaattctcaccaccggccgaccagtttgtcattgcagtttgcgacatatttatacctgtcacacccttcagtacccaagctccttctttatatcccttatcgtccgtttgggcagagacgattgttgccaaagtggcaaataatatcattaaatatatacgtttcatactgttattcgttttaattgttccgcaaaacaaagacgtctttgtatttcaaacagagtaaactatttttttgttcagaaacaaataaaagaatgattgtatggaaattacaggatgatacctcctcccagcaacagacctgcctcatcgtaaaatgccgcagcctgtccggaagcaatggattccagtggttcgcgcaatagcacatgcaagaaattctcatccgttatactgacagtgcagtgattagcttgcttccgatagcgaatcctgacaatgacatcctcggaattcagtaaacgggaagtatccacaatattccagtctttcaacagcatttcctctttgtaaagagaagccagaggcgcaagtatcacttcgttcctctctttatgtatctcttttacgaaaacaggacggttcagatgaatacccaatcctctgcgctgaccaatcgtatagaaaggatatccttcgtgccaacctaaaaaagtcccgctttcatcgagaaattgtccttttcccggcaaagcatcctgcggaacttcacgctgcaagaaagagcggtaatccatcgggcagaagcatacaccaagactatcctttttggttgctgtccgttcaaagccccgcttagcagcataggcacgcacttcatttttagtccagtcacccattggaaggagcatacgttctaaaatgttctgttgcagtccccagaggaagaaagtctgatccttatcacggtcggcagccggggctataaagtaataaccatcccgaaaaactttacgtacgtagtgtccggtagaaatccaataaatgcccatttcatcggcaatctttgccagcaacggccatttcagttcattgttacagagagtacagggaacaggggtacgggcggaaagatattcatctacgaaatagcggataatgcgttcacggaataattcgcgggcatcatagatgatgtgcgggatattcaggcgggaagcgagattacgggcatcatccaaagattcttcaaagccttccgaatcatagaaacgaaacgtcacaccggttacttcataaccggcctcttgcaacagcatggcggcaacagaactatctgtgcctccactcatacctaacaatacacgcttcttcgatttcatggatgcaaaagtaacaaaggaaaaagaaaatcactacatttgctacctttaaaaacaacaacgccaatgaactactatatctgtgatgatatcacctggaagaaatccctctcactactaaaaaatgacatggaagggcaacgtgtctattccagcctctggcagatgacacgagacgtactgatgctttcactcagccttagcgctatggcaagtctcgccatattagtattcggactcataaggttcataatcgataccatgtccgggactacagaacagacaatgaccctgttcgatgtaatcatcttctcaatgacttgtccggcaacatttgttgtccccctcacttgggtattagcttatttcggatggtataaaaatctccgaaagatcaattcccttttacaaaagttcatagcctctctttccgagacagagaatgtcaaacgtacttctccggtatcttatactttccgctaccatcaaaaagagtttcatgcactattcgaagaaaaggaaaattcgacaaccgtggcagtagcaaaaggcgatctcatactcctattgccttatcaagatacgcaacaacgaactacagatgaactatttgaagaaataaaaggtttccttatagggaaacaattcgcttcctttgccatggggccgaaatatatgctgttcgcattcaatagccgccctgcacccgctcagacagaggtaaaacagtccgcagagatgctactctacctaacagaacgttttcaactacaggaccccatccctgaagaggaggaagaataagttcatccgatagtcacttccctcttaactatcagcaagaaaaagaatgaaagaacttattatcttatgaaattgttgtaactttgtgctctttaaagaactaaaattcaaacgttatggaacatcaactgacaatttacaacaccttagataggaaaaaggagctattcgtgccactgcacgctccacatgtaggtatgtatgtctgcggtcctaccgtttacggtgacgcgcacttgggacatgcacgtcctgccattactttcgacttgcttttccgctaccttacccatttgggatataaggtacgttatgtccgcaacatcaccgatgtaggccatctggaacatgacgctgacgacggagaagacaaaatagccaagaaagcacgactggaacaattggagccgatggaagtagcgcaatactacatcaaccgttaccacaaggcaatggaagcgctgaacgtactttcacccagcatcgaaccgcacgcttcgggacacatcatcgagcagatagagctggtgaaagagatcctgaagaatggctatgcttatgtcagtgaaggctctgtctactttgacgtagagaaatacaataaggattaccattacggaaaactctccggccgcaatctggatgacgtactgaacaccacccgcgaactggacggacaagcagaaaagcataaccccgccgactttgccttatggaaatgtgcccaaccggagcatatcatgcgttggccctctccatggagcgacggtttcccgggatggcatgccgaatgtacggccatgggtaagaaatacctcggcgaacatttcgatattcacggtggtggtatggaccttatcttccctcaccacgaatgtgagattgctcaatcggttgcatcacagggcaatgacatggtacattactggatgcacaacaatatgattaccatcaacggacagaagatgggtaagtcttacggtaacttcatcaatctggacgagttcttcaacggcacacataagttgctgacacaagcatacagtccgatgaccatccgcttcttcatcctgcaagctcactatcgcagtacggtagacttcagcaacgaagctttgcaagcagcggaaaagggattaacccgaatgatggatgccgtgaacggactggaaaagatcactccgtccgccaccacttccagcgtagatgtaaaagcagtgcgtgagaagtgctatgaagccatgaatgatgacttgaataccccgatagtcattgctcatcttttcgacggagccagaatgattaacaacatcattgcaggcaacgataccatcactgccgatgatctgaaagagctgaaagaaactttccatctcttctgcttcgacattttgggactgaaagaagaaaacaattccaatgaagaacgtgaaattgctttcggtaaagtagtagatatgttactggaagagcgcatgaaggccaaagccaataaagactgggctaccagtgataagattcgcaatgaacttacagcactcggttttgagataaaagacggtaaagacggttgcgagtggaagctgaataaataagctccaccaccctataaaaaagctgcctccctctgatccaagcgaatcgagggaggcagtttcatttagaaaagagagttttagtaaggtatcatgtcggaaagaatacgttccttataccagggatcatctatcgccttcaactccttgcccatctcacggcaaagttctgcaacgatttctttattttcttccaatggaagattattcatctgataagggtccttttcatcatcaaacaacaggcttttcttcagcttatggtctttcttatcaatatagaaagccaaagtatagcgtgccgtcttatatcctcttgaagaagggaagtaagtctgcactttaccatccgcatccttttctccgtccagattctggatatacaaagcaccaccgggacgttcaatttccgccttttcatcgaagaaaagaggtgcccagttgcgtccctgcacattagacggaatggaatcgcccaaaccacacagccccaggacagtcggcataatatccggcgcggacatcagaagattgtctacacgcggctggatatgaccgggataacgtaccaggaacggtatattcatagattcggaataaggagaattcttcggatcatccgtgaactggctacacatcgtttcaccatggtcggaagcaaagatcacaatcgtattcttatccaaaccctgctctttcagtgtttcaaggatctgtccgaaagcacggtctacaccggtaacagaggcaaagtagtagcgaacgctctctgctttttcacgcttcttatctgcattgggacggataagaaggctgtccagaggttgatctttgtacagattgaaatcttcttccatacaatcatccaatgaacggtacgggctgtggggcggattcataccaaccattataaagaaaggtttcttcggatcacgtacattcccttcgttcttcagataggaaaccaccatcttggactcatgcaacggtgaccattctttcggatcgtgacgatttccatccgtatcccagtaacggggattcttatgttcatcaaaagtaccgtaggagtaccagtaattaaagccgtgacggcgttctttcggcgtataggcatcccaggcaggtatgcgatcttctacatagtgaccgggacgttgcggatcgttcggtgtagggaagtcagcatgtaacttaccaaaataagcgcagtcatatccggacttattaaatacatcacctatacaatccacgtcggcacgcagggaactgataggccggtttgaattacagttcaaaggtattccgcttttattgggatacatccccgtcaacagcataccccgatgaggactactcaacggacagttactttgggcagaacttaacaccaacgcttcacgggcaaagctattcaagttaggagtatgcaccggatcattgcggaagttcaccttgtcgcgaaacccatcctgtccccagaactccatagcctgattacggtactggtcggggaagacataaataacattcggaagttgtgcctgctctccctgctgagttttgcagccttgcagggcaaacaggcccaagcctcccaaaaacaaactaaaccgatttatcattttattcttattaaattacgttgaaattataaatgggaatttatcggtgagatactgttgctatcacaccgaatggaaactttgccggggtgctacgcccctaaattatcatttatagtttcagcatgtgaattaaaacagcttcttgtttgattccaagtctcttttgcgcataattccttccaggaagtaatagtccgcataattcaacggaacatcaatctcagcaccatgagggatactgcctacagagtgcatcagaatgaaattaccgtttgtgcccacttctgcacgataagccggagaagcgagattttccataatcttatctgctgtttccttatagtttttgccgggaatgtatgtactcaactcgtacaaagcagatgccgtacatgcagcagccgaaacgtcacggggttcgttcggaatattgggagcatcaaagtcccaatacggtacaaggtcctccggcaagttcggattattgaagataaagttataaatcttttcagccatatcaagatacttctgatcgtgggtataacggtaacacatggtatatccgtaaatagcccatgcctgtccgcgtgcccaggcggattcgtcagcatacccctgtgcggtttgtttcttacgtacctcaccggttacgggatcataatccactacgtgataacagctgttattggcacggaaatggttcttcatggtggtatcggcatgcttcacggcaacattataataagtggaatcgcctgaaagcttggaagcttcgaacaatagttccaggttcatcatattatctataataaccgggcatttccaaccgcgttctgcctgccagcctttatcggcatcccaagactgaagtacgcctgccgccggacggaaacgggtagaaagagacttagccgtctgaataatcacaggcttgtattcttctttaccggcaaaacgatatccgttcagatagctgcaaccaatcataaagcccacatcatgatgccaggtcaggtattgcacggaatccagcgcttctgtatacttctcagccagtggcaaccatttcttatcaccggtcaactcatacgtataccagatattaccggggaagaaaccggaacaccagtcatcaatgggtacataaacaatgctaccatccttgttgatagttcttggattcagaattttccctgacttttcgataatgtcggtctgaatggtctcctgcgccaccgcattatcaatattctcttggataaagttgctctcggtctgcttctgacctgtgcaacccgccaaaacaaggagggatattcccaatgtcgtgaggattgttttcataataatgatttgtttattaaagtttcgtattctttcgtcagcaaaagtagcgcaggtttacagaaaagaccctcctaaattatacaggaaaagggcaaaattgttacatttgcacataaatcatacagattgaactttttaatcatattgaaaacatgactccacaagaatttttcaagaaggatctctttgcagaacaaaccggcgtagaactactggaagtgcgcgaaggatatagtaaagcacgcctcgttatcacggagaatcaccttaacgcaggacgccgcacccaaggcggagccatcttcacccttgcagacctggcactggccgccgctgccaattcacatggtgcactggctttctccctgtcttccattatcacctttttgcgcgccagcggaccgggtgacacactgtatgccgaagcacgcgaacggtacatcggacgtactaccggatattatcagatagatatcacgaaccaggacggaaaactgattgctacattcgagtccagcgtattcagaaaaggggatccgctgccgttcagcttgtagctcgtagctcgcaactatctcatttcttctttaccaccgacgtcatcggataacgatttccttgtacgctcttcaggaaagcctttgccgacccgaagttaagatacatatccagacgaatcgggagatgattcttatcatctgagataaagaaagtaatcacttctttttcttttcctttcttatattctacaaaagagaatacgaggcaacgataaatcgtatcattattggcttttacatcttctttgccccggtaaatcagcgtctgttcttctaccttacgtccggtggccatagggaaaagaatccggtcgcctattttataatctgccggatcgtaagaacgcgcctgcgccaggatactcaacatatcgaagatgcaacggctgtcactgtattccatctcttgcggatcgcgaaccggattgtgccagatacgcctctgtttcacgttggatacgccatccttatatgaaaaccaagcttcatccaccgtatagcggtcaccctcttcggccgctttacggaagtagagcggctccagcttttcactgacataacaagtcagcgtatcacgcatcttaaagaagaaatcggtctttttacttcctaccgaaagcaagttgaagcggtaggcaggttgtgactgataagtagtggagaaggtggtcaaacttgccagccccaccttcttccagataaacttccagttaaaatataaatcgtacatcacgtgctcgccggactgaaatgcggtgttttgagccgtacattgtgccttggcaggcgtggacatcatcgtaagcaacagtgctcccaacaggcagaacacccatccgcgcttaccggttattgccggagctgcggttattctggtttctctttttcttgtcttcatctggtttttgttttttgagttcatccggtttctgtttatccagcggcttttcatgtatgttccaatcctgggtcaagtcgaaattagctttcagttctatcacctgaggatagtaatacactttctccggttgccgtttgtcttcgtattttccggtgtcccacacaccgtttccattcgtatcatttataaggcgcgcactatatttgccgggattcaggaagtagaaatctgccttaccatcgacaaccggcactgtacgtaccactttatcctgtgcgtccagcaattctacaaaagcaatcgaatccgctcccgtcacattatagaatatttgcccgtactcttcaggtttcttcaccttaaattctttctttatcttatcggtgaaaaggccatatattccatggaaagccgtcgagtcgacttcaaaagcatagctttcaccgggcacccaatctgcataaacattatagcgcatcaggttcagagagtccggaacaaagtcgtaagggacatcattccacaaactgtctactttctgtttcagatgaatggcaccatcagcaacagttgccaacggttcagtaaacgtaagagaaatatagtcatagatatccatcgtacccggtgcatatacatctacaggtaagaataccgtcggttctacatactccttaccctctttctccgctttctttttggctttttccagttccttttctttcttctcacgttccttctcaagttctttctcggacttaggtcgaatcttcgatacaagtctcagagtatccgtacgcggtaccaactggttgagcgtatccgtatagaggtaagtgagactcatcttcaaagtatccatcttatagatcagagagtctcttatccaataatgaagcgtatcaatgcgtccggttggcttctccacgatgaaagcgttggtttcatcgaaattcagtcccttcaacaacggcaagctgtcagcctgggtagagaaatagaaagagaatttccgggattcgggacgttcgctcctgatgagacgttgcgacaaaacccgttctttgaaacagcgcaatataacgtcatccggagaaaaatgagtataagctctctccatgatcgtatctatcgtcagagaatctttccaaagtgtatcaagacgtgtccgttcatccatggcaggaataatcagggagtcttcgaaagcaatcatttcagtgggctgactataatagaagttttggtcagcatcttgcaatccgtagatgcggtattcgcccggagcaacaccccgaattgtgaaacgtccacgactgtcggtacgccctacacgttcaaagggtatcgtagtaaaggccgaatcagctaaattggaatgcatacctaccagcatacctttcaccggttccagattggctgcattcagcacggtaccggaaaccaccatcgagtcgataacggaacccgtggagaaagtaaacccgaaatcgggcaatggattaccttcattattgtcctgaatagcatccgagaagtctatcgaataagtcatatccagctttagggtatcctttaaggtgattaccaccttcttcccattcgcctttatctccggttgttgcacctggggtggagaaatcacaatcttctccccgggtttctcaagcttgatgaattcatcaaattcaatcgtaattttcttccggttattattaagcgcgcccggcgcaggcgtactacctacgaagcgtggaggggtttcatcaatagcaccaccttccggacgaccgatgctggcgcaggaataaagcacgacaccaacaacggcaacacctgccagacgattgaaaagagacttcatatctaaatatttattacgtaatatgctgcaaaaataaaggttatcccttaataaacagaatgctttacagtattttaatcaaaaaagagcaagaagacagtaaaaacagataaaacaaaggaaaggttcaatcgggaggatgaaagagaagatacttcagcaaggtcctgcgaagaagggcaactatttgtgtgacaatccactgggtgttccacaacaatcagtcgcaatgaaacacgagttcagtcgtagtgggaagtaccttcagtcgtagtgggagctagcctcagtcgtagtgggaaatagcttcactcgtaatgggaatattattcccttctgtaatatagaaaccggagaggtaaaagctgattagaatggcatcttggagacttatatataagatatgtatgaaacatagttaaaaatagacgcaaatagaactaatctgttcaaaaatagataattttgcagccggaaaacccgaagagtgctttaagttttcccctttgtcctccgtattatccaaactatgacaagacagaaaaagccttttttaccaagatgaaaaaataaaccaaaagacagagaataattacaagtatgaagagtagattgattttattggcatgttgcctgtcactgttcagttgcggacaaagtgacaaaactacgggtaaagcgcccgaatttgcagtgattacagtagaaacgaccactgccaacttaacgaacagctatccggctacgatcagaggtaaacaagatgttgaaatccgccccatggtaagcggtttcatcaccaaactgcatgtagacgaaggttcagtagtacgcaagggacaagtattgttcagcattgaccccgtacagtatcaagctgccgtgaactcagccaaagctgctgttgaaacagctaaagctgccgtgaacacgcaagaacttaccgtaaacaacaagcgtgagttgaacaaaaagaatatcatcagcaactatgatttgcagatggcagagaatcaactggcacaaacaaaagcacaattagcacaagctgaagcacaattagtaaacgccaagaacaatctgtcgtataccagtgtaaccagccccagtgatggtgtagtaggtagcatcccctaccgtgtaggtagcttggtgagcccttccgttaccactccgctgactaccgttgccgatatttctgaaatgtacgcttacttctccatgaccgaaagacaattactttcacaaatacgcgagggtggcagcaccaaggaaatcctggagaagatgcctgatgtacagttgcaactcatcgatggaaccatgtatgccgacagcggacgcgtggaaacgatcagtggtgttatcgaacagaagacaggctctgtaaccatgcgtgccctcttccccaaccagcgtaacgttctgcgcagcggaagtaccggtaatgtggtattccccaacccgatgacgaatgttattatgatacctcaatcagccactacagaaatacaggataaaaagttcgtattcgtagtgcagcctgacaacaccctgaagaatacggaaattcaggtgttcaagctgaacgatggtaagtattactacgtaaccgaaggtctgaaagccggtgataaagtagtaatggaaggtgtgcaaaacctgagagacggagcatctatcactcctatcactcctgccgaaaaagaagctgaatatcagaaagcactgaaagaccagaaagagggtaatatccaaactgcgttcaattaacgtttaacggttagtgatcagtgataagcggctgcgctattataccgcaggtacttatcactaatcactaacccctaatcactaaataacatgaaattagatagatttattaatcgtccggtactatctacggtaatctccgtactgatagtgatcctgggtcttattggtctggcaaccttgcctatcacccaatacccggacattgcaccgccaaccgtatcggtgcgcgccacctacacgggtgccaacgcccaaacggtgttgaactccgttattgcaccgctggaagaccagatcaacggtgtagagaacatgatgtacatgacttccaatgccaccaacagtggttccgccgatatttccgtttacttcaaacagggaaccaacccggatatggctgccgtaaacgtacagaaccgtgtatctatggcacaaggtctgctgcctgccgaagtaaccaaggtaggtgtgacgacacaaaagagacaaacttccatgttgatggtattctctatttatgatgagacggaccaatacaacatcgagttcctggaaaactatgccaacatcaaccttattcctgaagtaaagcgtgtggccggtgtaggtgatgcgatggtgttgggtactgactactccatgcgtatctggctgaagcctgacgtgatggctcagtataaattgatacctaatgatgtagcagctgctttggcagaacagaatattgaggctgcccccggacagtttggtgaacgtggtaaccagacattccaatatacaatacgttacaaaggacgtctgcaacagtcggaagaatttgaggacatcgttatcaaagcaatggagaacggagaagtactccgtctgaaggatatcgctgatatcgagctgggacgtctgacctatagtttcaataacaccgtaaacggtcataaggccgtcagctgtattgtattccagatggccggaagtaatgctacacaaaccatcagtgacctggagacattgttgaatgattattccgataaactgcccgcaggcttgcatatcaatattgcacagagtgccaacgacttcctgttcgcctctattcatgaggtaatcaagacattgatcgaggcctttatcctggtgttcatcgtggtatatgtcttcttgcaggacttccgttctacgttgattcccgccatcgctattccggtagcattgatcgcaacgttcttcgtactgaaactaatcggcttcagtatcaacttgctgaccctttcagccatggtgctcgccattgcgatagtggtcgacgatgccatagtcgtcgtcgagggtgtccatgcgaagttagaccaggggtataagtctgcccgtgccgcttccatcgacgccatgagtgaattgggtggtgccatcgtttctattacgctggtcatgatgtctgtatttatccctgtaagtttcatgggtggtacggcaggtatattctaccgacagttcggtctgacgatggctatcgctatcggtttctccgcattgaacgctttgacgttgagtccggcattgtgtgccatcttcctgaaaccgcatgacgagcatggtgaaaagaaatcgacatttatcagtcgtttccatacaggcttcaatgtagcttatgacaagatgctgaagaaatacaaaaataatgtattattcttcatccaaaagaaatggttgagtttcggtcttgtagtcggttccatcgtattactgattttcttcatgaagattactccgacgggtatggtgcctaacgaagatacgggtaccatcatgggggtagtaactctgcctccgggtacttcacaggaacgcgcacaagaggtgctgaaccgtgtagatagccttgtggccgccgaaccggcagttgcatcccgtacagtgatttccggttatagcttcatcggtggacagggaccttcttacggttctatcatcatcaagctgaaaaactgggacgaacgttccacaatgcaaaattcaaacatcgtctacatcacgctctttatgcgtgcacagaagattatcaaggaagcgcaggtactgttcttcgctcctcctatgatttcgggttactctgcatccagcgacatcgagttgaacatgcaggataagaccggtggtgacctgaaccacttcttcgatgtagtgaaatcttacaatgccgcattggaagcacgcccggaaatcaactcggcaaagacgaccttcaatccgagcttcccacaatatatgctggacattgacgctgctgcctgtaagaaggcaggtatcagtccgagcgacatcctcagcactatgcaggggtacttcggcggtctgtatgcttctaacttcaacagtttcggtaagatgtaccgtgtaatggttcaggcagaaccggaagcaaccaagaatctggagtcattgtccagcatcaaggtgcgcaacggcgatgaaatggccccgataactcagttcgtttccatcaagaaggtatacggacccgatattatcagccgcttcaacttgtatacttctatgaaagtaatggttgccccagcttccggatatacttccggtcaggcactggcggctatcgctgaggttgccaaagagaacctacctgccggtttcgcttacgaattgggaggtatggcacgtgaagaggccgaaaccagtggtagcaccacaggattgatcttcgttctctgcttcgtattcgtttacctgttgctgagtgcacaatatgaaagttacatcttgccgcttgccgtactgttgtctattccgtttggtctgttgggtagcttcctgttcgtcaacggtatgagcgccatcggtaatatctccattctgaaaatgataatggggtccatgtccaacgacatttatatgcagattgcattgatcatgttgatgggtctgttggcgaagaatgccatcttgattattgagtttgccctcgaccgtcgtaagatgggtatgagtattacgtgggcagccgtactgggtgccgcagcccgtctgcgtcctatcttgatgacatcactggccatgatcgtcggtttgattccgttgatgatggcatccggtgcaggtgccaatggtaaccgtacattgggtacctctgccatcggtggtatgttaatcggtatgattcttcagatctttatcgtaccggccctgttcgttgcattccaatatctgcaagagaagattaaaccgatggaatgggctgatgtggataactctgatgcagaacctgaaattgagcaatacactaaataagtattaggtataaatacttttatcattatgaagaaacaaattataactctgatgtgtgcaactgctcttttaagcagttgccatatctacaaatcatacgacagacccgaagatattacggctgccggactgtatcgcgacacgacagctgtgaacgatacactggcagcggatactgcaaacttcggtaacctgccttggagggaagtattcaccgaccctcagttgcaagcgctcatcgaacaagcacttgccaataatccagatttgcgcagtgccgctctgaacgtgaagaaagcggaagctgcactgatgtctgcacgcctggcttatgctcccacgcttgcactgtctccgcagggaactgtaagcagttgggataagggaaaggctacgcaaacttattcgcttcctgtcacagcaagctggcaaatagacctcttcggtcagatactgaacccgaaacgtggtgcacaagtgtctctgaaacagacacagttctatgaacaagccgtgcaaactcaggtaattgccaatgtggccaatatgtactacacattgttgatgctcgaccgacagttacagattacagaatccactgccgatattcttaaaaagaatgtggaaaccgtagaagcaatgaaggacgcaggcatttacaatacgacttctgccggagtagaacaaacccgtgccgcctacgcacaggtgctggcttctctgcccagtatgcgtcaaagtattcgtgaaacagaaaatgctctttgcctgatgttgaatcaaccggcacaggaaatagaacgtggtgtactggaaggccaacaattaccgacagaattctctgccggtattcctttgcaactgttatctaaccgtcccgatgtaaaagctgccgagatgtctcttgctgcaagttattacgatactaacagcgcacgtgcagctttctatccgcaaattacattgagtggttcggcaggatggactaacagtgcaggttctgcaattgtaaatccgggcaagttactggcttccgccataggatcgttgacacaaccgctattctatcgcggtgctaatatcgcccgtctgaaacaggccaaagcacaggaagagcaatccaaaatccagttccagaccactttgctgaaagcaggaaatgaagtgagcaatgccttgtatcaataccaaatgacctccgaaaaagccgtttctcgcgagattcaggtaaattctgcccgcaaagctgcggaagatacaaaagaattgtttaacttaggcacgtcaacgtatctggaagttctgtctgctgagcaatcttacctcagtgcacaaacctccgaggtatccgacactttcgaccgcatgcaagctgttatcagcctgtaccaggcgctcggaggaggcagaaagtaataactaaaaactaattactatgataagtccattagcatttgtagatcctgccgcaaagctcggcaagaatgtaacggttcagccttttgcatatatcgaaggcgatgtggagattggagatgattgtattatcatgtccggtgcgcgtattctcgacggtacacgcttggggcaaaggaacaaagtgcatcatggcgccgtactcggtaccgtcccgcaggattttcattatacgggcgagaagagtctgctgatcatcggcgaccagaacgacattcgcgaaaatgtagttgtgagccgtgctacacatgaaggagatgccacacgtatcggcaacgagaacttcctgatggatggtgtacacctttgccatgatgtgcagataggtaaccactgcgtagtgggacttaagactatcatagccggtgactgtcgtatcagtgactttaccattctgagcagtaacgtcattttgcaacaacaatgccacatcggaagttgggtattgatccagtcaggatgccgcattgcgaaagacgttcctccttatgttattatgaatggtaatccggcaagttatcatggcattaatgctgttgtactgcaacataagcatcaggtaacagaccgcattctgcgtcatattgtaaatgcttaccgactgatttaccaaggtaacttcagcatacaggatgctttgcaaaagattgaggatcaggtaccgatgagtgatgagatacacaatatccttaatttcgtacgcgagtctaaaggcattgtaaaataaaggaatactccttattcagaaggcggtcgggtttactcgtccgccttttttgttatctttgcaccaccttacccattcaattatgagaaagaagaagaaaaaacaaacgaatagcaagaaacaactgacgctcctgattatcctgatcatatgcggcatcgtcaccacttatcaaactacgaactctaaagaaaaggctactggtactgaacaaacagagaccatcgttcagaatcttcccctgaattctgatatatacatcaagcaaactactacccccggtactcccgaaattcttctgcaacgtaccgggtacctcgtatcctataactccaacacccacatagccaactgggtagcttggaaactgactcccgaacgtttaaaggaaaataccgagcgaatcaataatttccgtcctgaccctgatctgcctaaaagtaaagccgtcaccacacaagactataaaggtagtggttgggaccgcgggcatctttgtccggcaggtgacaacaaatgggaccgtgaagccatgatagaaagtttttacatgaccaacatctgtccccagcatcacaatctaaaccggggcgactggaacgaattggaacagaaatgccgcaagtgggtgaaaaaagacagttgtctttacattgtagccggccctatcttctatgaccggaagccacagactataggcgagcataaagtagccgtaccggatgctttctttaaagtgatactttctctgcacaaaaggccgaaagctatcggctttatctataaaaacaacgaaggaaataatccactggactcttatgtaaacactgtggatgaagtggagcggatcacagggatagacttcttccccgcccttcccgatgatatagaaaaggcggtagaagcaagctataatttgaaagactggaaatagttactcaaaattcaatgtaccgaagaattcgggacagtggaaatttggcttttccagattaatgggattccatgagaggaaatgaggcgtttgcaacttatctccgcatttgtagaaattagcacgaaccgtctttccgtcaagactggtgatttgatgtttgaagaaagcagaataaggaatgaccaatgccaattcccagttgcacgctcctacccgttcttcaaaagattcgcgtcccagagaagaccaacgctgcaccttatccattacttcttgcggagcatgttcgcgattgctacgtccgccacctgcaccgatcagcaaagttcccacacagttacactctacgttataataaattccatctcccgcaggaatagaaaagaattctacgcaagcatcttcccatacagcaccgttatctcccgttgctacagcacgcacactggcttcctttactttataatgaattaaaatcgcaccatctgtatgggcaatacggaattgtacttccggttgataaggaaacgctttccagttcaccgtattgatcgactgaaaatccaccttttctttgtccagcaaggcaggaacattctccaccgccacattagccagactcactttctttacattcaactctttcatttctttcttttgggggttagttgcagacaagggataaaaacagagcagagataaaaacaagactgctgatttcaacaccaagtgtgcaagggttcttttgttcatattttgattgcattaaagaattcatttcttttcggttatgaattaattcaccacagattacacagattgacacagattttattttactgattattagattaataaatctgtgtgaatctgtgtaatctgtggtgagtcttattcctttccatcctgttataaacagaccttataccaatgattcctttataaactccttcatctccggtgtatgttcctcggcactttgaagcaatttaaactgcgcttttgtacgtacaaggttgtgttccggatatttaatcttataataagtatcaccattaatataatctgccaaaaaacgaacacactgcatgtaagggaacaacgcagcggcatacggcaagttctcaatctctaccggaagcaaaaagacttttgcagactccagatagccttttgcaaacgccttaaagattgccatattgaagttcacattatccaggtctttatcatcctcggtgcccgtattggctgctgaacgaaggaagtctccgaaatcagaaaagataaaattgggcattacggtatcgagatcaattacgcaaagcaccttcccttcttcatcgaacatcatattgttcaccttcgtatcgcagtggcatacacgtttaggcaatttaccctcacgatacaaacgttcacctttacacatttcgtctgcacgcttttcaatctcatccagataatattgcacttctttcacccgacctaccgcatccgcagccacggcatcccgaagctgcttcagacgaaactccatattatggaagtcaggaatcgtctctcccagcgtatccggaatatccgcaagcatcgcctggaaattgccaaaagcaacaccggcataataagaatattccgcatccaccgtttcataagtcttcgcattgggaatgaaagtcatgatgcgccaatagttttcgccatcgtaccaatacgtttttcccgtatcggcaggaataaaagaaagtaccttgcggtcgatatcatccgctccctgttccgtaagtttcttgcggatatgccgggtaacggcttcaatgtttgtctgcaacatttccacattctggaagatagcgtggttgatacgttgcaatacatagtcgggcgcgtcggcttccaaagtagtcactttgtacgtgtcattaatcagtccgctgcccaaaggctggatttcgttaactgtacccttcgtattgaaatgggatacaatggattggaggttattcatgatattttataatagatttaaaattggtatgcaaatatacaccttccgaatgaaagcaaaagtcaaaattcgtccgacaaacgcccaaaaatatacatttcgacagacataaccataaaaaacagccaataaacatcccccttttgagcaaaacgccttatatttgtgtttgaaaccttaaaataccggaggaaaagtgcaaaagtttatcagaacgctgtttcttgttttagtaagcatagttacagcaaacgtacacagccagaatatcactttcaatcatttaaccaccgacgacggcctatctcagtttagtgtcaacagtttgtatattgatgaaaatggtatcttatggattgctacgcgcgaaggtttgaaccgttacaatggaaacgatatacagacttacaaactgaacaaaaacgatccctacagccttttctgtaacaccgtgctccgtatggcaggcgaccagaacggaaaaatctacctgctctgtaccgaaggtgttgcccagttcgatctgactacccaacgcttcaccaccctcctgcaaggaaacatcaatagcatatattataaaaacggccttttcatcgggaaaaagaatgaaatataccgctataatgagcaaaccgataactttgatctttactaccagatggcaggagaaaacatcgaaatatcctgcatgttcgaagacaaaggacacatgtggataggaaccaccagcgaaggtgtgttcaatctgaaaatagacaaacatctgctaactcaccccatcgagaaaggaaatatcaccagtatttaccaggacaatgcaggcgaactgtggatcggaagctgggaaaagggactcttccgagtgaaaacagacggaaatatcgagaacctgcgaaacgacccgaagaacccgcatagcatatcttccgattttgtcagatcctgctgtgaggataatcttggcaatatctggatagggaccttcaacggcctgaaccggtacaataaaacgacaggacttttccagaaccatacctccaacgagatgcagaatgaaggacttacacactcgtccatctggtgcatcgtaaaagataatcaaggtactttatggctgggtacttacttcggcggtgtcaattacttcaaccccgaatatgaaatctatacccgatacaaagcttccattcatgaaaaagaaggattaagcagtcccgtagtcggacgcaccattgaagataagaacggaaatctgtggattggcacagaaggaggcggactgaacttctacaaccgccggacacgtgagttcaagtggtatcttgccggacaaggacgcaacagcatctcccacagtaacgtgaaagccctttattatgatcccgcaaaggaaatcatctggataggaacccaccttggcggactgaacaaactggatatccgcacaggtacattcacgcattatcttatggaagaaggaaatccggaaactcttccgtccaatatcgttcgtgacattgccccctaccaggaccaactgattgtcgctacccaaaacggtgtatgcctgttcaaccctcagaccggaaaatgtcaacagctctttaaagatagcaaagaagggcgtaaaatagctatggttgcagatgtagaggtagataatagcggtacgctctggattgccgccacaggcgaaggtatcttctcctaccgcttcgatacgaacaagttgaccaactaccgtcacgacggaacgcaggcacacagcctcagcaacaataatgtgaacaacatcatgcaggacagtaagggtaacttatggttctctacttcgggaagtggcctcgacctgtaccgttccgctaccaacgatttcgaaaacttcgacaagggcaagaacggacttgtcagtgattgcatttacgatacacaagaatctcccgtcagcggtaaactgatactgattaccaatcagggcttctccatcttcgatcagaaagtggaaaagtttcagaactacagtgtggagaatggtttcccactgacagctgtcaatgaaaacgccctttgtgtgacacgcgacggagaaatcttccttggcggtacgcaaggtatgctctcattcaatgaactggaacttaatttcaccccgaagccttacaagatcatcctttcccgcctcatcgtaaacggcgccgaagtaaaagtgagcgatgaaacgggcattttgacgcaatccctatgccatacacaggaaatcaccctaaatgctaaccaaaccatgttcagcatcgaattcgccacctccaactacgtggcagccaataagaacgaaatcatttacaagctggaaggcttctccgaagactggaacagcacccgcggccaacctatcatcacctacacgaacctgaatgccggaacatacaatctgctgattaaacctaaagggaaagaagagtccatctgtccgcaggtgcatcttacgattcatgtactgccaccttattataagactccgctcgcctatcttatttatctgatagtgaccggtatccttttgtggtatctggtgaagacatacaaatcgagaattaagctgcgtgaatcgttgaagtacgaacagaagcatatacaagacgtggaagcgctgaaccaatcgaaactacgcttcttcaccaacatctcacacgagttccgcacgccgcttacactcatcgtatcgcaggtggaaactctgatgcaattgcaaaacttcacacccaccatttataataagatactgagcatttaccaaaacagcatccaactgcgcgaactgatcaccgaactcctagacttccgcaaacaggaacaaggacacatgaaggtaaaagtcagtccgcacaacatagtgcatttcctttatgagaattacctcatcttcatggaatatgcaagcagcaaacagatcaatttcaattttgagaaagactgtgaaagtcttgaagtatggtatgaccagaagcaaatgcagaaggtaatcaacaacctgctatccaatgccatcaagcatacccaagccgaagataccatcacactcagcatcaccaccgaaggcaatgaagccgtaattcgcgtgactgatacaggtagcggtatcgatgccaaagaagtagataagatattcgaccgtttctatcagacagagcagatggacagtctcaccaccggtgtaggcaccggcatcggtctggccctgacaaaaggcatcgtcgaactgcaccacggcaccatcaaggtagaaagcgaactgggcaagggcagcagtttcatcgtccgccttcacctgggcaacgcccatttcaagactgaggaaatcagcaaaaagagcgaagacgtacagcaaatagaacaaccgcaaatttctgaaatagatgcttcactcaaagctgaattggaagaaaacgccccgattaagcgcatgcccgatgtcaagatggttatcgtggaagacaatgcctccatttgtgagatgttagcaaacatcttccgcccattctatcaagtgctgacagccgcagacggtgaagaaggtctggagctgatacagaaggaaatgccgaatattgtggtaagcgacgtcgttatgcccaaaatgtccggtaccgagctctgcaaacagattaaaaatgatttcaatacttgccacataccggtagtattgcttaccgcacggactgccgtagaacaaaacattgaaggactgcgtatcggtgcggacgattacatcaccaaaccattcaacacgaatctgttgatttcgcgttgtaacaacctggtaaattcacgcattctcctccaagaaaagttcagtaaacaaccacaagcttatgcgcagatgcttgccaccaacccgatagataaggaaattctggaccgcgccatcagcatcatcgaaaagaatctggataatacggaatttaatgtcaatatctttgcccgcgaaatggctatggcacgcaccaacctattcactaaactgaaagccatcaccggacaaacaccgaatgacttcatcctgaccatccgcctgaaaaaaggcgccttgatgttgcggaacaacccggaactaaacattaccgagatatcggacaaaataggtttcagttcttcacgctacttctcaaaatgtttcaaggacgtataccagatcagtccgctggcataccgtaaaggggaaaatatggactccgatgaaaagaacgaagaagaaccgcctcttgccacttaacaggcaagaggccggcaaagtaccaaacatacactcgatacgtgttttgtacgtttttccccttcacttgtactctactatacacagaatttcccgaaagccattacctttgacctcagaaataacaatctaaagtcaaagagctatgaaacatttttcacctttatggtctctcctcccgggcgcagccctgatagctggatgtggaaatccatcgaaaaaggaaaccactgacaacacccgtcagaaacctaatgtgatatacttaattgccgacgatttgggtatcggcgatttgagttgctatggcgctaccaagataagtactcctaatatcgaccgtcttgccggacaaggtgtacagtttaccaatgcctatgctacttcctctaccagtactccttcccgcttcggtctgttgacaggtatgtatccttggaggcaggaaaacacgggaatcgctccgggtaactctgagctgattatcgacacagcctgtgtcaccatggctgatatgttcaaggcagaaggctatgctaccggcgccgtaggaaaatggcatctaggactcggccctaaaggtggtacggacttcaatcatctgataaagcctaatactcaagatataggatttgattacgaatacatcattcccgccacagttgaccgtgtaccttgtgtattcgttgagaacggacatgtagtaggtttggatcctaacgatcccattaccgtcaactataactacaaagtgggtgactggcctaccggattggagaatccggaacttgtaaaactgaaacccagtcagggacataacaatacgattgtaaatggtattccccgtatcggttggatgaccggtggtaaatctgctctttgggtggatgaggacattgcagatgtcatcacaggtaaagcaaaagattttattatcaagcataaagacgaacctttctttatgtacatgggtacgcaagatgtacatgttccacgcgtcccccacgcccgtttcgccggaaagagcggtatgggaacccgtggtgatgtaatcttgcaactggactggactgtgggcgagattatgaacactctggacagtctgaaccttgcggataacaccatctttgtattctgtagcgataacggccctgtcattgacgacggctatcaagatcaggctcttgaactactgaacggtcacactcctatgaaacaataccgtggtggaaagtacagtgcctatgaagccggaacacgtattccattcattgtacgttggcctgccggtattcagccttgtaaacagcaagctttattctctatgattgatgtatatgcttctttggctgcgttgttgaatcacccgcttacacccgcaaccgttgcgcctgacagccgtgatcaattagccactttcttagggaaagataataccggatgcgactatgtagtacagcagaatttgaacaatactttatcgattattcaaggaacatggaagtacatcgagccaagtgataaacccgctgtcgaacattggactaaaatggagttagggaatgatcccaaacctcaactgtacaatatttccatagatccgtcggagaaaaataacgttgcagcagcacatccggagatggtaaaagagctttcaacactactggagcaggtaagggccgggaagaaccagggtacaaagtaaggaatcgtacagaacagggtttctttatcaagaatgtacaaattcgtactttttgcgaactattaactaaagtcgacttctattcaatcacatacatttgcgttgtgattcgagtcgtttaacgagaaagaacaaccttttttaaaaactaattaatttaatatttatgaaacagaaagtaaccttaatgctattggcaacttttctttgctgcgtattaggcgtacaggcacagacaggaagtcaagttacaggtaaagttgttgatgccatgggagaacttcccggagtcagcgtcgttgtgaaaggaactactaatggaactactaccgacgtaaatggtgagtttaagttaggtaacgtaaaaaactctgatgtcttacaattttcttttatcggatataaaactttagatgtaaaagtcggaaatcaaagaaaattcgatgttacattacaggaagatgctcaagcattggatgaagttgttgttgtagctgttgggtatggtgacgttagaagacgcgacttgacaggttctattggatcggctaatatgagcgatctagttaaagctcctgtcaccaacattgccgaaagtttaggtggtcgtattgcaggtgtacaagtttcatcctctgatggtggtttaggcgacaatttcaacattgttattcgtggagccggctcattaacaggaagtaccgcacctctttatgtagttgacggattccctcaagaaacatctaccatgagtgcacttaaccaaaacgatatcgaatctattgatattttaaaagatgcatctgcaactgctatctatggtgcacgcggtgcaaatggtgttgttattattaccaccaaaaaaggtggcgcaggtaaacctacaatcacttataatggtagcatgacagtaggtcaggtgaaaaacactgcagatatgatgaatgcatatgagtttgttcaactgcaacgcgaacttcttgatgatgcagattttgaaagtaactatattactgacctttatggttctctcgaagattatagatatgctccaacatatgattggcaagactatatttatcgtacagcgttaagtcataatcatcatgtttctatgacaggttcacagggcgatcttaaatattctacttcattatcctataccgatcagcaaggtatcatcatcagatctggcttaaaacgttatcaaggacgtgtaaacctgagccaaaaagtaaataagagattgaaagttgatttcacaggtaactatgccagtaatgtacaagatggtcctactgcctcaaccgctacgacagccatgtctacagcctacatgtatagtgtatgggcatttcgtcccgtatcacctaccggatcagacatgttaaaccagatgtatgatgaaggtgtcaatatgacagaagactaccgttttaacccagtacattctgcacgtaatgaatatcgtcacaaaaccactaacaatttacaattcaatgttagtgcggattacgaattcatcaaaggattgaaactgaaaattgctgccggatacacttcaagagactatacgaatgaagaattcaacagttcaatgacccgtacgggtaactcacatccttcaaatacacaaagtaaaggtattaatgcttatctgtacaaatcagaagcaagaagttatctgaacgaaaatactcttacctatcagttcaataaaaacaagcataactttaatgcactggcaggtctttctttccagaagaatacaagctacatctattccattacagcagaacatatagctaaagattcctatggaatggcaggtttggacaaaggttcatctactccttctgtaacatcatcaaagggagaaaatacattgatgtcctacttcggacgtatcaactacaactatgactctcgctattatgtaactgccactatgcgtgctgacggttcttccaaatttgcaaaaaataatcgctggggttactttccttctggttcattggcctgggcattccaacgtgaagcttttatgtcagatgtaaactggctatcaaatggtaaattacgtttcagttatggacaaacaggtaacaaccgtattggtaattatgaatatatggctcaccttgttaccagtgatgatgtatataaatatccctggaacggacagttcaatcaaggatatgtactaagtagtatggaaaatgagaaattaaaatgggagacaacagaacagttagacttcggtattgatttaggtttcctaaacggacgtattaatcttacgatggattattatatcaaaaccacaaaagatttactacttgatgctaatattgcagctagttccggctttgcaacagccaccctaaatgtaggtaagttgcgcaataacggttttgaacttacactggaaacaacaaacgttaaaaccaaagattttaactggacatccaactttaatatcgcgttcaataagaacaagattatttctctgaactcaggtcaggaagatattactagctacattacttgggataataaatatcgtaccacacctgcatacattagcaaaaagggtgaagcagcaggcaaaatgtatggtttcatctatgaaggaacttataaatatgaggatttcaatattactgaagaaaatggaaaaaaggtttatactcttaaagaaggtattccttattacgtagccaatactcaaccaggcgatccgaaatacaaagatctggataatagtggtacaattactgacaaagataaaacgacaatcggtaatggacagcctaaacatattggtggtttcagcaataacttcacctacaaaaactgggatctgaatatcttcctgcaatggagctatggcaacgacattctgaatgccaaccgccttgtattcgaaaatcctggaggtaaaaagaacaccaatatgtttgcaggatacgttaaccgctggactgaagataatccaactagtaatattccacgtgcaaaagcaaatggtgctgcagaatacagttcactatatgtagaagatggttcattcctgaaactgaaaactatctctttaggatacaatttcctgcctaagacattaagaccgcttcatatcagtagtgcacgtctttatgtgtcagcagaaaatatagcaacaatcactggatattctggtaatgaccctgaagtgtcaactcgtaattctattttgaccccaggattcgactggtcaccttatccacgttcattcaatatgtctgtgggattaaatgtaacattctaattaataaaaaacagaatatgaaaacaatatataaaagcttgagaaatatcagcctcgccctatgtgccacaatggccatcagttcctgcgatagctttttagatacgaaaccttatgattttgttgccccacaaacgttctatacaaacgaatcggaatgtacaatggctttggccggagtgtattacacactagtttacgaacaaacttatggtaactattactcatgtatgatttccaatgtagatgatctgagctactaccaacgccctgaaggccaaacagccagctacgtatatggtaatgatcatagccctagcgaacaatatatctggggggcatgggaaactctatataaagggattaataatgccaatatgctaatagagaatgtagatggtgctgacatggaagatgctataaaaacccgaatcaaaggtgaagccaaatttcttcgtgcatactaccacttcttattagttcaaggatggtacgaagttcctcttcgtccagaatcattcaaggacgtaaacaattcatccaaagaagcaacttcgcatgttgaagctttggattggattatccaggaaatggaagattgcgtagatatggtagataatacaaactatgatttatctccgtcatatgttaagaagaattcagttatgggcgtacttgcccgcgtttacttgtggcgtgcttgttatccatttgacggaaaaatttccagtgatggaaaagcctacttcgaaaaagcagcttactgggcaacccaagttaaaaattcaaataagcatcacttgaatcctgatgtttataccatgtggaaagcaatggcttcagatacttatgatacagaatataatgaatctatctgggaagccgaatttataggtacacgcgacgatggtagctacacagctggacgcattggcaatgtaataggtaatatccagaaaggtactgcaaatccaggtaatggatatgcctacggtttctacgcccccacactaatactttgggatctatttgacgaaaaagacaagcgtcgcgatctctctatcgcaccttaccaaatcaatgccaaagaagaaaaggtagaatggactgcaaagcaaatcgtacaacggtcctgtggaaaattccgtcgtgaatgggaaagtgctgcaacaaagcacaaaaactatacccctgagaattacccactattacgttatgcagatgtactgttaatgcttgctgaagctgaaaacgaagccaaccaaggtcctacaacatcggcctacgaagctattaatgaagtacgcgaacgtgccggaatcgatcctctgaagaatttatcttatagcgattttcagcaagctgtacgtgacgaacgtgcccgtgaattatgttttgaatctttacgtaaatatgacttggtacgatggggaatttacgagaaagcgatccacgatgatttaggtgctgctacaaaagactctcgttgggctaccggtactaatttcatcggtgcagctacctacgctcaaagaacatcggaaaagcaccagtttcttcctatccccaccaaagaactgggtgtgaatactaagctaaaacaaaacaaatattgggaataatcatttagttacgcataacttctaaccttaaaatgaaatcaaatagaccttaatcaatttgatatgtatggggagagtgaccgtgaggttcctctccctctttttaaaaacttaaaaacaatatgccttatgaccagaaaacacttgctattcatccttgcgctgctatgcggtcaagtatcctttgcccaactgataggttttgagactgggattcccaagcagtttcaaacaagtgataagggaaagataactttatctactcagtattataaagaagggaaacagagtctgaaatgggatttccgttccggttccaagctcaacgttgctcttgaacagcctctcacccttgatgagcgaatggaaaattcatacggaataaccttatggatttataatgaagtccctcaacaagattccattcgttttgaattcctttccccccaaggagatgtctcttattggttcagtttccagttggcatcggctggttggcgcgcttgctggatcggcttccagcacatgaaaggagataaacaaaacaaagaaatagcaagctatcggctgatagctcctgaacgaaaaggtcgcatatttctggaccgcttgactttccctgtgaaaaagatgaacgaccgcactacccccgacttacagatgccttacaataactccctctcgtatcgtgacctgtggcattggtgccgggtttggcaatgggaacaatataggtatgatattccattaccttccaccctcaatcaagcagaaaaagacgaactgcgtaccgtagaacagcgattaactaatgccctcgatattcagaaagcgccgaaggaagctgtttccaaagcatacgatgtttttcagaaagccaatattcaacgctccggaacaggattcaccggtactccgattctaacacccgatgagcttgaccgttctaaaggagaaatttcctggaatgacctggagacaatgctctccggattcgcttacgatgcttattataatcattccgaaacttcccgccagaattacttcaccgtctgggacttcgccatagatcagggattctctttcggtagcggaatgggaaccaatcatcattacggatatcaggtacggaaaatctatactacagcctggttaatgcgcgacgctatctggaaagctcccaaccgggataatatcttgtccaccctcattttctggtctgccttgcaagaaacccgtcaaccttaccaatacggcagagatgaattactggacagctggcacaccctcttaatggctaaaacagtttcagcattactcttcactgacgagcgggaacgagtacgcgcactgaaaggtctttcccgttgggtatcctcttctcttcaatacactccgggcactatcggaggtatcaaagtagacggaaccactttccaccatggcggtttctatccggcatataccacaggtgtccttgccatggtagggcaattcatctccttaaccaataagacaatctatgaacctaccgaagaagcccgtcaagtactgaaatccgcctttattgccatgcgcaactactccaacaaatatgaatggggagttggcatcagcggacgacatcctttcggcggctcgatgaaagcggatgatgtagcagcttttgcttatctagccctgtcaggagacttatcaggagaaggtaatacctttgatcatcatttagcagcagactatctacggctttgtgaaaaggatacgccggaagcacgttacttcaaaacgcaaggcattactcccgcctctgccccacaaggattctttgtatataactatggagcagcaggtattttccgaagaagcgattggatggtaaccttaaagggatataccactgatgtttggggatctgaaatttaccggaaagacaatcgctacggacgttatcaaagttatggttccgtccagattatgggatatccctcacgccttgccagcggttatgatgagaatggttgggattggaatcgcctaccgggaactacgaccatccacttaccattcgaattactggatagcccgctaccgggaactaccatggcacattccaaagaaaatttctcaggtagtagttcattggaagggaaaaacggcatgtttgttacgaaactgatggaacgtgaactgaaaaacttcactccagatttcgtggcccgcaaatccgtcttctgctttgaaaaccggatgatctgtttaggaacaggtattcataacagcaataacgaatatccaaccgaaacaactctcttccaaagtacattccaaaagggaaagagcaccatcctcgttaacggagaagaagaaaaagagattggtttcaaaaagaaactttccggtactactgaaaagttactttctatcagggacggttacaataaccattatttcgtgaaagacggtaatgtacaaatacagatcaaggaacaagaatctcatcatgaaaaaacacgtgctgtaacacagggcactttcgcttcagcatggattgaacatggaaaagcccctaaaaacggaacgtatgaatacctcgtatggatacagccaaccgatctgaaattaaaagaacatgaggctttgcaaacatacgaagtattacaacgaaatgatagtgcacatatcgttcacgaccgattaaccaatatcactgcctatgctgtcttcgaaacctatcgctcgcaacgggatagcctgcttagtcttattccggcagaaacaatggttatgtataggagggacaaagcgaatatcattatgagcgtttgcgatccaaacctaaatattgaggaaaaggcatataccaccaagaaccccagccgcgttcttaaaaagagacttgaattaaaaggaaaatggaaaatcagtatacctaatgaaaaagtaatcctgactgcagacggagagaataccattctcactgttcattgccaacatgggcaacctgtagaattcagtctccagcaaaattgaaaatcccggaggaatatttgtagcaattactctgctacatgtctggaagttgtctgaaccgtacttgctccgtacattctccactcagaggtacctctacacgacgaaagtacgaggttggtacggagcaagtatagttcaggtatggttttatggaacatggttattccgctaaaatagttacctttgcagaaatattgaataactaattgatatgcagagtaccctccccattcattttgccccgctgcaaggttacaccgaggctatttaccgacaagcgcatgcccgtatattcggtggtgtagagagctattatactccttttgtacgtgtagagcacggagaaatccgaaaaaaagacatgcgcgagattactctggaaaacaaccgtggcgtgcagcttattccacagctcattgctcccgatgtggacaaaatgaagcagataattgccctattcatcgaaaaaggatataagaatgtggacataaatctgggatgttctttccctcttttggctaaacggcacaatggttcgggaatgcttccttatcccgaagaagtacgggagttgctgactgctgccataaagaatcaccccgaccttcagttctctgtcaagatgaggttgggttgggagaacccggaagaaagtctggctttgctaccctttctgaatgaactgccactgacacatatcattatgcatccccgattgggaaaacagcaatataaaggggaagtggatttaaaaggttttgaagccttctacaacgaatgcagccatccgcttatttataacggtgatttacttacagtagaagatatacagactatcagcgaacgctttccacgactggcaggtaccatgataggtcgtggactgcttgctaatcccgccttagctttagagtatcaacagggacatccgctttccgaaaaggatatgcaggagagactcagattgttccatgctgacgtatttgcccagtatggcaatcttctggaagggggagacaaacaactgctgacgaaaatgaaaaacttctgggaatatctgatgccggacggagaccgaaaagcaaaaaaggcgattcataagtccaacaagctggaaacttaccaagcggcagtccgcagcttgttggggtaatcattcatcttattccggatttacgcccggaatcgtatgtacatctttacgtatctgcgctacatgatgcaacttcatccagtcgtgcaggtactcacggtgttgcaacaggatctctttgtatttctcctcgatggcgaggttccgcatttcgccacggtctttttccatatcaaaaagttgctcacggtaacggcctttgtcatataacacatatttatagcgagaggtacgcaaagcccagccacgtgtatttccacctttatcgaaagtagtttcggttacgatatagtcctgatgcttcaatgacggatcagctttctctaccaacgatctgaaagagacaccatgcagcccttcaggaagccggatgcctgcccagtcgcaaactgctgcaaagaaatcgacaccattattcacgagttgcggcatctccttgccggcattcttctttcccggtaaggttacaatcagagggatatttaccacctcttcatataaagccgatttctggttccagtggtgtgctcccactccgtcgccatgatcactggtaaatatcacgactgtattcttccataaatcctgtttatctatagcattcagaatcttaccgatttccgcatccaccttttcaaccagacggtaatagaggttccggtaacggcgccaatcatccggagtatagttacgggtaggataagccgaataattcaggctctgctcataactgataacatcagcgtcatagggattcttagcaaaattaagaggtagtcccggccactcattctgcggcaggtcttctatatttccccaaggcaaattctggctacgtgcgtactcacagatattatgcgggttatcgaatcctgccaccaagaagaagggtttggtatgtttttgttccagaaagccgccacaggcttccgccagcccattatcactatgaggatggatagtagtaaagccaaactctttatccggcatggaggcagtatgtacatgccatttaccagcatagatacaatcataaccggcattttgcatcagtgttcccaaagtccgggtacgcaatgaatccggtatcggcgtaccatttcgggcaagtcctacttcgtgcgaagtatagcctgtaaacatagctgccctggcaggtccactcaggggcgtagaacaataggcattacggaacagaacacccgcctgtgccagtttatccatattcggagtatgcaagtcatcgtttcccatgcaactcatcgcagaggctgtctgctgatcggtaacaatgtagatgatattaggcaactctttcgcccaagccaaagaaggaacgacagccgttgcacacaacattatattctttactttcatcacagttctattttaaggattaacttcattattttttcagttccacatcgaagctggcggcatctctgcacgtaaattgcaaaacagtctgctgcttatctttggaaatcactttgcaataaggagtttctgcaacattccattcaccctttaaagtaacggttactggtatttcaccactatcattatcaatccagggacgcgaataaatactgcgttccatacgtttgccatccttgtcaaaagcctcatcgctcggacctcgatatagtgccagatccggttgggaaacggtcaataagagcttatctctgtcttcacgtatcatgacgaggcaggaagtatcagctttctgtagcaatccctccccgggcaatgcctgtggtgtttcaaaaagtacatatgaagtcaggttatcggtcagagaacgaacgatatgagcgttgcgatcctgttgcaataccttgtaagacggtttctttacgaaagctttcaaggaagctgcatccgtacgaggcaggacagcatattcataggaagcacctttcggagcttttccatgctctaataccaatgaaacccaatcaccggaagtaggtttcggattacgttcacctacggtaacttgtgggaaattcctttcatatttcgccgctttcatcgagtttttcgacagataatatcctactccgttaggatcgatataggtctgtccgtcacttttataagctacccaataatcatgcatttcgggagtagtggctgccaactggaaaacggtagtttctgtcgggaactcttcatttgtattctcaatatccgttcccagacatacgatcgttccattgaagaagtgataagatttacgggcacggtgtgaaccgttgtacttgtcatgctcgtgaagcttcatgccgaagttaccatttaattttgcctgagacaagccacctgcaaaagcctcgtcggaataaagcatttcttccatacctgagaaagtatctacattcatcactttggcacgaagctgatcgaatggcaaatgaatagtcgtcgtaccgggaaaacggttccagtcgaagcctgcttcctgccaaccactggttgtaaaagtaaccatttcatcgggttttccggtcaatatctgcatacttccgtgagccaggtaacgaccgaagaaattagcatccagataatgttcggctgcccaaaggtaacgggaatgcccacgtaccacagcagcccaattatcccggcgctgtactgaaacgcagccgtaccctaacgccaaattaccttgcggatcgggttcggggcggaatccctgtgcttcaaatagttgtttcaatttctgttcatgggcagtagatgctttcggtagataatcaggagaattcttatcaggagtttccgtataagaaaccagacgcaaataagcagcagccagttcaggatcgtatttttgttttccatcgggagtgccagccaaggccaaagtagcatattgtataggaatcaactgtccctttccattgggatggcgtcctgacatggaaagagcccattgcttggtattacaatagaaacgcatagtgagcaatacattctttactgtttcgtgcgctatttcagatactttgaatcctgttccgctcaacagataaatcatattcgtggcaccatccagaccaccgaccgcataagccgggtagttattacgatggtggaaacaagcaccgtcttttttgaaagaaccggccaatccgagtgccggacggcaaccataatctatccaacgggagaaagaacggagatattgaagtttctcaggagtatcttccataatcaggatacttgccatgcgaccctgcgtctgcgtattgaaagtatctatatcaatgccattgaccgtgggtttaggatatacttcattggtgatggcataccagcgcaaggtacgttccgcttcgttcagctttccggcttctctcaatacatctttcatcaggaaataggccacatacaaaccgcgcatactgtatccgtaatgatggatattcccccaacaactgccataagccactccctgatcggtgatgtggtcgtacatggccaggaacttctgtttcagctcatcctttgccacagcatccgaagcgttgttataggcataggctatccggcgcatcagattgaaatactcactcatctccatccctaacttggtgaacatgcctttgtcccagttgggatacatacgttcgtaagcttcagcctggcgtaccataaagatgggtagtccgcttacaacaccgtctttataaataatcccatagaaatcatatttcttacggatacttttcatctctttttctgtcagtttagaaggagtataaagcatatcgcggaaacgtttctccatcaactgcatatcttgtctgtctttctcgctaaccggagtaagggctatttccggtttccacagggagtgttcataaatcaccagccaatggttggtggttcctttattaacgaaaggcacctgcacatcagctgtttgctgacgggcatccactttactggcagttatcagatggtctatgaacaactctccctttacatcaggtgcaacgatacgcagttcattcatcccgggttcaggagtgccttgcatatcgcgctcgtagcatacccacgcagcacgccagccggtgaagttaataccgaaaggaaaggaagtacacttctttccatctttcaggaattcaaactcaatagtagtatcctgagcctttgcattgtacacccaaactataaaagcggaaagataagtgtcttttccggtagggtctttcttctcaaacttcagatcacgctgaagggttagtacagaaccggggtcaaacgtccagcgcaaactatgcgtaccatctttataatgttggtcgctaatgccaagcgtggccttcgtagcgctcagcccggcaggaagttcaggttgttcaaaagagagcaaccggtcattctttacaacctgtgccgacaggctgaaagaaaacagtgcagtgcatacagcggcaagaataggtttcatcagattaagtttcgttatcatggtataagaatattaatagagttaattcaagtgttcgatacggaaattcgtgaagcggacatgattttgaagaaggcgtaagccaaaatgtccatcgcctgcaccggcttcgagaggcagacggaaaagttcctcaccatctacaagaaaagttgtgcaattgtcctgaacgcggatctgaatataataccattgattaggtttcaacagatgaaccgggtcggtatattctttaatcagaggtttgatacgggcctcgtctacatcataaaactgaccgtagtaacgacgaaaacgggtagtggtattatcattaccaccatagcctacataaaaaaggttcaatgtattatagttgcggaagacaccgtttcgccaagtggaacgggccaagagtttgccgggatgtttcgggtcgtttgcagcccagaagcagttcatatcactcagacggtcgtgtttaccgccattcattaccatacagatatggtaactgatctcgtaatcgccggtcaggcgatctttataccataaagtaagtccttcggggacaatcaattcaagagtatcttcacgaatggtgaagtccattattcccgactggtcttcggctatccaatggcccaatgagagccgatcctgtgccaatacggtacagggcaggaaaagaaaaagacatttccacagaatttgtatgaaaaatgaatgtgtcatttccggtattagtttcgtttacaatatttccacattgcaaagaaacggtactttttagagaaaatgacacataaatcgtacagaaaaggtatattttagtaatttaaggatgcatctcctcaaacgctttattctcctcttctatcgtagtgatggtttccggcagttcactgataggaagatcgaaattataccagtcagtatagcaatcggtaacgtaccacttcccgtcaatcagttcgaacactacgcgaagggaagcttccgactcatcatagccagcctcaaactctttatgtttggggttgttcacggtaaaccgggagacataaactccgccctcttcgtctgtgatacgttcttctttaaacgcatcttcacccagcaacgcccacttatcacgtgtaaacggaaaagttttctccgtctcaccgtcttcctctaacaaggctatgggagttttcaacggaaacttgatacgggaatactggaaagaagcactggaagtaaatttcttgaggaatgtctggaagtcctcattagttgcggcagcatgaccattcgtagtcgtcagcataagtaccgcgaaaagacaaaatacaaagtgaattgccttcatttagttacaatgtcaaagggtttattaatcaggcgcaaagataatgcaaatccgcagatttgagataaaaaggaaaaagaatattatacggtgatgttagatctatagatgcagcatgtcccatctatagatgcagcatgaccgatatatagatgcaacgcgtccgatatatagatgcaacatatccgatatatagaccctgcacccttatcatgtaacccttcatcatatgtttcatttctgcctcagatactcaaacccaaaacgacagcgtaagcagtctttcttatcgcaatactctttctgaagctgcaacaaagcctgcgaatcagcagcagtagatacaggtagtcctgccccactccagtggcggatgatatgattatcctccgctttcagactttctagaaagcccgtagcccgttcgcaaagctcttcattcgccttatgcaggccatacgcatataaaaaagggatgacagtattaataacaatcaggttctgagcattctttcccacttgtttttcacaggaggaagagactttccggaaattgaaatgttcttcccaatacggagaggtagcgacagtcagtagtttccggacagcttccagcgtatccgcttccataatacgggagaataaggactgttctttataataaagatttgccaactgcgccaagcggacatgagggaaattacccggacgtaagcgaagaaagcgccattgagtagcagccatcggaacaggcagttcaaacttatgctgcaagtagcgaaattccttctgcaacttcagataatacccgtctgcatccggcagttcttcatccagcagcccggcttgccccaaaaagaaggcttctacttgaaagagattatcccggtgcttatctatcgcacgaaaaggcagacgactggcccatgtttcaaaggcatccccattcagcccgaaaccaaagttgcgggccaaggtgataaagaatacatcttcccaatgattattgcatcgctccaaccgggcggcaatcacatgggctttctgctcgaaacgttctacctgcaaagcagaaagccaggaatggactgttagtttcggaagaaaagacaatatggaataacaaggaggatagatttccgcatgactcagttcatcataacgctgacgaacagattcaggacaggatagttgcagttgtggcaccggtgctccgtttgcacgaaacacttcgcaatctacagtttccgctacatgcagaatgacattgtcataagctgcatctttatcgtgaccatgcctcatccaatcggatgccaacgtatgcacttcgatgtttcccacccaaagggtaccaccaatttttagtttggcattgaagaagtcggggcctgcgtttgtgttcggtagtccggcatctatcacttcaaccggttcaccggtggtggtctggagcatctttaatggaaagattttatgcttccagacataatgcaatagtagttccattgttaacaagaagttaatgtacgcaacaaatgtaagaaaaagattatctttgcgacctatagaacgttgataaagtgaatttaatcagaagaaagaatgaaaatagcattaatcggttacggtaaaatgggtaaggaaatcgaaaagattgccctcagtcgcggacacgagattgtcagcatcatcgacgtaaacaaccaggaggattttaactcggacgctttcaagagcgcagacgttgccatagaattcacaaatcctatggtagcctactccaattatataaaaaccttcgaagccggagtgaagttggtttctggcagtaccggatggatggacaaacacggtgaggaaatcaagaaactttgtacccaagaaggaggtaaaacgctgttctgggcatccaatttcagcttgggcgtgaccatcttctctgccgtgaataagtatctggcaaagattatgaaccagtttcctgcctacgacgtgacgatgagcgagacacaccatattcataaactggatgcgccaagcggtacggccatcacgcttgccgaagaaattctggaaaatatcgaccgtaaagatcattgggtgaagggaactttgcaggcaccggacggaagtgtttccggttctgccgaatgtgcagcagatgaaattcctgtcagctccatccgcgaaggtgaagtaccgggcattcatgtgatccgttacgagtcggaagcagacagcatcatcctgacacacgatgccaagaatcgaaaaggttttgcactgggtgccgttcttgctgccgaatatactgctgacaagcaaggttatctgggaatgagtgacttgttcccgttcttaaaataataaacacgcttcaccacagattacacagattcgcacagatgaaagagaacagaattaaattttagtattaaaagaaagctgtgtgaatctgtgtaatctgtggtgaacaacaaaatctgtggtgaacaacaaaaataatataataatgagaaaagctactcgcgcccaatgggttaaattcgcaatcgtcaccgtgctttacctcgctttcctgatatgggtaaaaagctggttggggctgattgtcctacctttcatcttcgacatctacatcagcaagaaaattccctggggcttctggaagaaatcagagaatccggctgtacgcagtgttatgagttgggtagatgctatcgtgtttgcactggtagctgtttatttcgtcaacatctatgtatttcagaactatcagataccttcttcttctctggagaaatctttgctggtaggcgattatctttatgtcagcaagttgagttatggtccgcgtgtgccaaacacaccactgtctatgccattagcacaacacaccttgccgctagtgaatacaaaatcatacatcgagtggccccagtgggactataaacgtgttccgggtctgggtaaagtgaaacggaatgatatcgtagtattcaacttccctgccggagacaccgtagccactaacttccagcaaacggatttctacacccttgcctacaacgaaggacaacgcctctatccgaatccggtaaatatggacagtttgacgcgcaagcaacaacgcactgtctacgatctgtattataatgccggaagaaatctgatacgttccaatcccaagatgtacggtgatatcgttgtccgccccgtagaccgccgggaaaattacgtaaagcgctgcgttggcttacccggagacacactggaaatcaaagatgcacaggtatatatcgatggcaaaccgctcgaaaaccctgaagaaatgcaactcaactacttcgtacagactacaggaccatacattactgaagatatgttccgcgaattgggtatcagcaaggacgaccaaacattaatcagcaacgaaggtttattaatggaaatgggcttgactcaccgtgacgcacaaggtcgcctggctccggcctatgacttaccactgacgaagaaaatgtatgaaaccctgtctgccaataagaaactcgtcagcagcatcgttatggaaccggaaatattctccggccaaatgtatccgttgaacctttacaccaaatgggaccgcaacaactacggcccgatctggataccgaaaaaaggtgccaccatcaagctgactgaggacaatctgccgatctacgaacgccctatcagagcttatgaaggtaatacactggaagtaaaagaagacggcatctatattaatggcaagaagacggacgaatataccttcaaaatggattattactggatgatgggcgataaccgccacaactcagccgatgcccgttcgtggggtttcgtaccggaagaccatgttgtaggtaagccaattgttgtctggttatcactcgataaggatcgtggttggtttgatggaaaaatccgttggaaccggatattcaagtgggtaaaatgataccaaatgaaagaatgaaagaattaataatgaaataggtgagaacgtattcattattaattctttaattattaatttcgacatgaataaggcttggaaaataacgggagcaatcatcggaataatactcgttgtggtgttacttcggggttgtgttatgacttcctatcttattccttcttcgggtatggagaattccttatttcagggagagcgtattctggtaaataaatggagttacggtctgcgtcttccccttatggcattgtggaattatcaccgttgggcagacagccctgtacaaaaagaggatatcattgttttcaataatccggctaatctgtcagagcctgttatttcccggcgcgaaacattcatcagtcgatgcatcggcgtaccaggagataccttattgatagactccctgttctccgtaattccatcagaaaaaaacgctcccgaccagaagtttttatatacttatccacgagaaaaagaaaaacagctggattcattacttacactattgtccatatgcaacaaccacctgatgggacaagatagcataaaaaatgtacgtagcttcagccgttatgaatattatctgctggaacaggctatgaatggcaattgctggataaagttactgaatgaaggagactccatagaagccctgcgcccgttgatcgttcccggcaaaggtaaaccggtgcgtgtatatccgtggaaccgtactttactacgcaacacacttgtactgcatgagaataaacaagctgaaataaagaacgatactttgtacattgacgggaggcctgtacagcattgctatttcaccaaggattactactgggtaggtgctaataactctatcaatctctctgattcccgcttgtttggctttgtacccaaagaccacatcatcggtaaagcttcgctcatctggttttccaaaaagacagaaacaggattgttcaatggttatcgttggaaaagaatgtggaaaacggtaagataaatgaagtacgaattactaattacgaagtataaattacaaattgcgaagaaccaattatctcatgaaaaccatatacctctcttccgcctatctggcacccgtagaatattacgccaagttggtggcatacgataaaatctttatcgaacagcacgatcattatgtgaagcaaacctaccgtaaccgttgcaccattgcagcacccgatggcgaattagctctctccatccctaccgtcaaacccgatactctgaaatgtcccctaaaagatatccgcatttccgatcacggcaattggcgtcatctacactggaatgctttatcatcggcttataaccatactccttttttcgaatattatagagatgatttccaacctttctacgagaagaaatatgagtttttagtcgatttcaacgaagaactgtgtcatctggtctgttcactgatagatatacagccggacatggaacgtactacttcattccagagcagttttgcacccaatgaagatgatttccgcgagcgtatccatcccaaaaagaattacaaagaagaagatccggacttcatagtccggccttattatcaggttttccaggaacgtctcggcttcctgccgaatctgagtatcgtcgatcttcttttcaacatgggacctgagagcttacttgtgttgcagaaggcattttgagaacttctgcaaaaattccgcaagattcgctccttcttccagtcccagcttcttacgcaagcgataacgacttatttctaccccgcgcaaagaaatattcaacaatggagcaatctctttagaaagcaaattcattttgatataagcacaaagtaacttttccttgttgttcagttccggatatgcttcttccaattttttgaagaaatcatgatgtaccgaatcaaaggtactttggaatgcctgtaaatcgtcatcatgctcaatgttcgtatcaatctgtcccaacagacgaagtgttttccgacgaagagaaaccagattctcttcgctgatagaatgggaaatgcccagcacttccttttttatatccaatagaatttcattcttacgtacgatgttcaaagtagtacgaatcagttcctccgatttatgacgcaattccgactgtaggttttcttcttgcagtgaatctatcttctgatctttcagatcactttctttttgaaatttttgttcttgtcgatagagttccagttctttttgcattaacaagcgcttacgccctactgagatacgataatacacataataaaacagcaatactaccactaccgaataaaccagataactccaccatgtacgataccacggcggcaatatctcaaagacaaacgaagtttccacaggttcctggctgccgtcggtaagcaatttcacactgaatacatactttccttcatgcagtcctgtaaactctttcatattattctcactgtattcactccagattcctttctcaccacccgtacttaactgataagaatataacacagtgtgtgccttattgaagttgtttacactatattctattcgcattgaattttgagaataaggaatcactatcggtgctgtatcatataaataactgcgaccataaataagcgaatcacgcaatcccgtcaagtagactttcctgatttgcaatgtcaacggcatttgttgcaccggcaggctatccagtgtgatcagtgaaaaaccttcctctgttcctgccactaccttgttggccttataaagatttacatcttcaaagttttctatcaatgctcctttcaagaactgttcattagttacctggcgatactcctgcttattggcatcataatgtaatactttcaatgcgccatctgctacataccagatattttgcaatgaatctatcttcatataggtatatgctgcctttccttctaataactgttccaaccaaatacatgcttccagcgtatcacggctccgattatactgccacagaccataatgtgaagctatggtaacttcatctttcacccgcaacaaacaagcatcatatccacgtggaaagatgatgctattatagtctttcatcttttccacctttcgtaaatcatctgccaaagtcaaacggcaaaccccattttctttatttccaacccacaatatatgagtcgaatcttccatcaacatatctttgcacgaacgggcaaacccctctatatagctttctaccctccaactcatccctctcttcatgagcaaatacagtccactataagtgcctgcaatcaacacatccttacggtcatccaccgatacaattccccatactcctttgggattgttgagatgttccatatgatctccatccataataaagataccattatccgaacaacagaacaacttatcgtcatattggtgaagtgaccacatctgacctcctgtgcccggtacgaagtctatgggatttctctggtttaactgccctgggagagtagagcgatacaacccctgattcgttgcgaaatagtacttaccctgataactacaagatgcatatcccgaaccaatcacaggtttacctccataaagtgaagcaagccttgctttcaaatgaatgcagtcaatcccattatccaacccgagccataggttgccagtcttatcaaacagcatactcaacacagttttgttctgcaagccattttccgtagatatgatttccatctcattcgtcttcagatttaaaagacaaactccaccctggatagtgcccaacgccaacaacgaatcttgcaatgcagcacagaaaactctatttttacggcaaaagtcctcggctacagtattatatttcttaaaaacagtgccatcgtaaataaataatccgttatcccgggttaccatcaacaaactgtcctgatgaggtaacaatccaccgactttgacagtcgctcctatccccaaaggaccaagaacgggtataaactctgttccattcaacattagcaatccttcggcagaagtgatatacagtttgttacgcaagataaacgaagtgtagatctctgaagaataatctattttcttcacaatgccctcttcccaataaaagaaacgacggtccgattgaaaatacacccgttctccgtccaataagatattccagatgactccgacattcacattgggagataaactatcagaaaggcaagtatactccaacccaccaagacgatttggagtaaaatagccaaattgctccattccaccaatataaattcgcccgtcatgtcctactttcacagcacgtgttttggcattatgaatcggatatgtattccactccacaccgtcaaattccaataagcctttgttgttagctacatatatccaaccgttatcatgctgctgaatactccaattctgattaccggctttatatgtatgccgggtataatttgtcaccggacgttgccatccggcacttacaggaatagatatcaaaagaagaagaatataaaacaggaggtcttttcgtttcatagcagttaacgttttattctttgaaaacaaagatagggtattttacctacaaataaaagaattattttttagatgtagccatattattataataaacatttaattatcaacaaaataattaatccaagagaaagttctgatgtagttaaaaccaatgaatgagaaagttttgaagtagtgtatttttaggaaacaccctcatcatacgcatatatttgcagcggataaaaccattttgttaaacctatataagtcgtactaacatgaaaaacaaaagactattcacttatgtgtttcttttcggcctactggtcaacggtagtgcatgcggatcggaccacaatgaaacagacttccccgaaacgcccggcggtgaaactccgtcctcccctagtggtctacaagcctacatgcttaccaccactgacacccgtacctatgatttaagagaatccaccgtggaatttgagccccaagccagtatgtcgcctaaaaacatcctactgaatccacagcagatctaccaaactatgcagggattcggagcggcacttacaggatcatcagctttctgcctaaaactaatgaaacaggaagatcggacagcattcctcaaaagaacctattcgctaactgaaggttatggatgtagctatgtacgcattgccattggctgttccgacttctccttgaaagaatacacctgttgtgacacaccgggtatagaaaactttgctctgacttcagaagaaacagattacgtaatacctatcttaaaggagattattgctatcaacccggacatccgcatactgggttcaccctggacttgtcccttatggatgaaagactaccggaaataccctgtctaccaaaatcgggaatacaccgcaggacaactaaaacccgaatactatgctgactatgccacctattttgtgaagtggatacaggcatttcaggcagctggtattccaatcaatgccatcaccatacagaacgaaccactcaacaacaagaactcagcctcactggtgatggaatggaaagaacaacgtgattttgtgaaagtactgggtcctgcttttgaggctgctggactttccaccaaaatatacgcttacgaccacaactacaattatgataacaaaagcgaccaaaacggttatccctaccagatatacaacgattccgaagccgctaagtatatagcaggagcagcctaccatgactatggaggtaatcgcagcgaactgctcaacgtctaccaacgagctcctgagaaggacctgattttcacagaatcgtctatcggcacctggaataacggacacgacttgaccaaaactctcctttctaatatggaaagtatcggtataggcaccatcaataactattgcagtgcagtgaccatctggaacctgatgcttgaaacagacttcaacggaagcatacccagtaacaatggtggacaacctaaccgccccggcggatgtcaaacctgcttcggggctgtagacctaaacatgagtgatcttaaaactatctacatgaactcgcactactatatgatctgccacctgtcggcagtggtaagacccggtgccatacgaattggtacaagcggctacacagacaatgacatagcctacagtgctttcaagaatacagacggaagttatgccttcgtcatcatcaacaaaagcagttcagacaagaacattgtacttaccgcccccgatgacgccggtaagaagcactcggcaagttgcactctgcagccgcgctcagtaaactctttcaagtggaaataacagagattcaaacataataaatcacttttttaattttaaatttataaattatgagaaatcgatttttgctcggcatgatggcactcagccttataggtatgacatcatgcaaagatgagattgaccagttcgatgatcatggcagctcgactatcgtatcctttgcaggcactgaaaaagcctacatgggcgatagtatcaccttcgactttgaggtgaagagcggaggcgtgaaaatcaaccaggccaaagttcagctctattatggagaagaaatggtatccgaagccttctacagtctgaaagccgacggaaaatacagtggaaaagtgctggctccctaccagaaaaacacgcctgacggagaagcaaaggttatactgcgcatccaaaatgaacgtttcagcaatgacagtaaggaaatgaccgttgctatagagcgtccaaaatatcaaacattgaaacttgtggctgccaatggcaaggaatataccatgactcccgttccaggtaaagaatatgaatacaaagcacgtgaggctttcccactcgacatggaagcatctatcgtagcaccagcttattccgatggaacaggtaatccttatttgcagggcaatgaactgaaatttggtatggacaatggaaaaattgtcctcaatgccaccaagaatattggctttgaaaacacaggttacggtgaagacggcaagtatgaaatcacattcaataccctgactttcgaaggtagcccattcccaaaattcggtgtacgtttcgacacgcagaataagttcctggaattcgatgggtcgggcaatgttttctacatcgaaaccgaatttaagaaggatgatatcatcaaaatcagcggtgtcaaagaagaatatgctgattattggaagaaccccacttggtttgacctcgtgaaggaagacgaaactctgctccatttccgcggaagagacggcaagtataaactcactctgaacaaaggcatgaatgcaattatgatggaacagttggaaaaagcttcttcatcaagtacacagaatgctaccgctatgtgggtgattggtaatgataagataggattcccgtcatatgcccaaaacaacataaactggaatacggacaaagcattcaatctggttccgctcaccgataccaaatatgaactgatactacttgttggacagaatgtcaacggagtcaacttcaagttcttcggacagaagggatggggactggaatggaaaggccccggagcctataccgcaaaagaaggcggtgattatatcaaatatgccagtgacggcaacttcaacgccaatgccacctggccatctggaaaatatatggtgatgactgtagaaaccagcaccagcccgaatgaactatgggtgaaagctttggacgaactaccctcatacgaaatgggtgaatgatagactttcttaaagtatagataaacaattaagtatagatatatgaaaaaaagatattacatagcagccatgtttgcccttggtttggtagcccagcctgccatcctacgtgccaatgctgctgacgaagctaacagcattgaggctgtacagcaacaaaaacaacgcatcagcggtttgctgaccgattctaatggtgaccctatcatcggtgccaccgtcagagtacaaggtactaccaatcgtggtgttatcagtgacgtcgaaggacgatactccatcgaagctgctcccggcgaagtactggaattcagctatattggatttgtcagtatagaacacagagtgaaagctgatgaaaccaccttcaacctccgaatggagatggatgccatcgctacggaagaagtagtagttgtgggatatggtaaacagaagaaagagagcgtagtaagctccatgtccaccgtaggaccagctcaattgagtgtaaagagtgccaaccttaccaacaacatcgccggtaagctgtcaggtctgattgccgtacaacgttcgggcgaaccgggttgggatgacgcacaattctttatccgtggtatcagttcgtatgccggtggaacagacccattggtactggtggacggtgtaccccgtaagatgaacgatatcgatgtggacgaaattgaaacattctctatcctaaaagacgccgccgcaacggccgtgtatggtgccgaaggtgctaacggtgtggtattgattacttccaaacgtggtaaatcacaaaaaacagttgtcagtatgtcagcagaatacggctactcgacaccgctccgcctgcccaacctcatgagttcttacgactatttgagcttatacaacgaggcagactggaacagcaacggtaacccgcgcgccaactatacagcaccggtgagcgacgctgatctggaaaaatatcgtagcggcgtagatcctgatctatatccggatgcagactggatgagtatgctacgtgatcacaccagcagccagcgctacaccattaacttccgtggtggtggtgaccgcgtacgcttcttcgtatcaggtgcctactacacacaagacggtgtatacaaggagaagaagaacgccgattacgattcaaacatcagtttcgaccgttataaccttcgttccaatattgacttcgaattgagcaagactacccgtatgtccgtagatatgtcaggacagtatatcaaccgtgtggctccctccaaaacagccagcgacatcttcggtggtatgacattgcaacctgtacacctctatccgcaaatctattctgacggttcagcttcacaacatcctaactatgataattcaggtcttcgtcaaaacccctacaacttcctctacttcagtggatacagtaaaagctgggacgctacattccaaagcaaggtattgctagaacaagacttggatttcatcacaaagggactttctataaggggtagtgtcagtttcgatgccaactccaaccagtatgtcaaccgtactatgtcacccgctacttttacagctaccggacgtgacgccgatggcaacctgatattcaagtcactggagtcaggctcggcattgagtaacccctcaagcggttcatccggtggtaacaagaaaatatacattgaggcgtccctcaactataagcgtaacttcagtgacaagcacgatgttacaggcttgctgctatacaaccaaaaggaaactcaaaaacaaaacgttggcggactcaacctgcttccttaccgtaagcaaagcgtcgtaggacgcggttcttatacttacgacaaccgctacaccatcgaaggcagcttcggtatgacaggtagtgagaatttcgctccgggacaccgttggggtattttccctgctgtgggtggagcctggtatgtgagccatgaaaagttcttcgaacctgtgcagaaagtaatcagtacactgaagttacgtgcatcctacggacggaccggtaacgatcagttaggtgaaactcgtttcccttatcaggaagccatgaataccgatgccggcggtcttaacctgggtatctcaggcatctctaatggtaatgcacagaactggttcggcggattgagcgaaaaccgtgcctactacgccaacctgcgttgggagattgaggataaaaccaatatcggtttcgacctcggcttgctgaacggacagttggacctctccatggactacttctccaaccgtcgtaaagacatcctgattacccgtaatacggttccttctatgagcggtttacaatccaacccaactcagaactatggtatcgtaagtaacaaaggtgtagatgggaacctgactttcaaacagcatgtgggtggcctgaatctgacattccgtgccaactatacgtatgccaagaacaagattgtagaaacagatgaaatcaaacatagatacagctaccaggacctcacaggtatgtcattgtggactccttacctctacattgccgacggtctttatacacccgatgatttcaacatcaccattgatcctgtgagcggtgccgaaagctaccaactgaaacccggcatagccgacccgggagctgctgtggcacccggtgatatcaagtaccgcgacttaaacgaggacggacttatcaacgacgatgacaagacctaccgtaatggtcatctggacaagaccccgcgcagtgtgtacggtctttcactgaatgccgaatggaaaggattcttcgccggtatcttcttccaaggcgtgacgggctgttccatcaacctgatgagcaaagcatccaacttcatgccgttcaaccaaggcaaggacgcttcttctgcgcgtatggaggctatgaaccgctggaaagcatccgacccctacaacgacaacgtgctctaccctcgcttgcgtaacaatacctttgcacacaacctgcaagcgagtacctggtggtatcgcgacgccagcttcatccgcttgaagaacgtggaattcggttaccaattcaacaagaagcaactgaaatcactgcgtctcaccaacctgcgcctttacgtgcaaggtactaacctaaaaacttgggatcacgtgaagtattgggatccggaactgggcgatgcaaactcaggcgccaaataccccatctccagcacctggacctttggagcagaagttacattctaaacatctaattaataaacgatatgaaactgaaaaatttactatacgcaaccgtcggctctgccgtccttgcattcagcacagcatcttgttcagactatcttgacatatcaggcgagttcaacgccagtctgggagtcgatcaagtttgggacaatgcaacctatacccgaaactggtacggggtcatctaccgcaatctgatggaatattcagaaaccggatcagaagttaacgccttcaaaaatccatggtcaaacctctgcggtgaaatcgcttcagaaaaagctagttcacgcgacgtcatgatggcaggtttcacggcagccagcggaagttatcatcgctgggctactttctacaaagacatacgccaagctatgatcttcattgaacgcgcccacgaccaaggtgtaggcgaccccagcagtactaacaagctgactgccgaagaaatagcccgcatgaaagacgaatgccgattcatgatagcctattattacttttccatgttcgagctttatggccctgcctgcatcgtgacggagatagacgacgctgccgaaccgcacataacggactacgaccgcgctactgtagacgaaatggtgaaccacattgatggcatattggctcccctatgtgaccccgcacagtcaaaattgcccgaatcagtcatcacatcatacgcagacaatacatacaacttcaacaccaatgaagtggtgcgccccactatcgtagtggccaaagcactacgcgccaagttgtggatgtatgctgcctccaagttattcaatggtggcgatggttccgaatattaccagggactgcagaagttgcagaactctaaaggtgaatacatcttcccacagagtaaggacccgcagaaatgggtaactgccagagaccgcgtaaaggatctgatagactatgctgaagcgcaacaccacgctctctatcgcgtgatggcaaacggagtagagcaacccgaccgttctgtatacaaccttttccaggtgtacaatgaagaaatcctgtggtgcagtaccaacaacagctactccgaccagtacaagatggagaaacgcactaacccgcgtgacgtgaactcatgctatggtaccatcggcccgtctcaggatgctgtagacatgttcttcatgggcaacggcctcgccatcaatgacccaaacagtggttatgacgaaaccggattcagtgctgtagaaaaccattgctacgaccccgactataaagacaagaagacagaccagaatatctccaacatgtatgccaaccgtgaaccgcgtttctacgcaagcgttgtatatcagggaagaagctggttcaagaaatggatgaatggtaatcccaactacatcgtagatttctctgcaggtggcggaaacgacctttccaacggtgacaacgtgaaaaccgggtatatgctggggaaatttaagaaccgtaccgtaaatcatgccagcggcgatactcagagttggaaacgtgtttccatcatctatcgtctggccgaattctatctgttctatgccgaagcactcaatgaaacagatccgagtaatccagacatcatcaagtatatcgacatggtacgcgaacgcgcaggcatcccaggctatcagaccatgaacgataacggtatcaagaccggcataatcggcaattacgacaagcagttcgatgccatacagcacgaacgctatgtagagctctattgcgagggacaacgctatttcgacatccgtcgttggatgatctgcggtgacaaggacagaataggttgcgaccagacacgtttctacggaatgaacatgaagggttcaaaagacaaaactccgggcgaaccaacttcttactacacgcgtacgaaagtagaaaaccgacaatggacagacaaactctacctctatcccatccatcagaatgtgatagaactggccaacggacgtattccacaaaattacggatggtaaaaaagacagcttttttgattagttttcgaaggatataagtaaaaagattgaatgaaggtttggaggcagaaactggcataaccggcctggtaactgcctcctttctttttcagctaataaaccaacaataaatataccatgagcaaagagaaaaaatatcgaatcgggacatacctgatcctgatacctgctattctgttcctattccccaaagtatacgcacaacatgagagcaaaacgatcaacgacagttggaaattctatcagggagaatgcaaagctgccgcttcagcaacctatgatgacagtgcgtggaacagcatacatctcccgcacacatggaatacggatgcatatacagaaaaaaagtattaccagggaacaggctggtatcgccgtacactgacattaccgaaaaattggcaaaccaaacaggtattcctgaaactggatgcagccagtaaggccgctgccatctacatgaatggacgaaaaataggtgagcataacggtggatatactgcctgcacattcgatatcaccccattctgttcatttgacgctcctaattctctcgctatccatgtagataatgcccgacaggatattccccccatctctgccgactttacattcttcggcggtatctaccgggatgtatggcttacagccgtacccaaacaacatttccatttgacgaactatggttcagaaggaatatttatcagtaccccgcaagtatccgaagaaaaaggcacaatacttattcgcggagagataaagaacgatgcagaacagaaagcatctcttgaactggaacatatcatctacaatcccgatggaagtattgcccagacccagaaacagtctatccagataaaaggtggagaattatactctttccgcaccgaaacctcccctattctgtccccccgattatgggcacccgaggctcctcatctctacagagtagaaagcattctgcgcgataaaaaaacaaaagccatcctcgaccacagtaatcaccatacaggcttccgctggtttagcttcgatggtaagaccggcttctccctcaacggaaaaccttataaattacgcggtatttgccgccatcaggaccaaaaacccatcggagttgccctgacagacgaaatgcaccgtcgtgacatgaagttaatgaaagaaatgggtgccaacttcatccgcatctcccattatccgcaagatgacgctctgttggaaatgtgcgacaaactcggtatgctggcttgggaagaaatacccattattgatattgtgcccgacactcccggctatgcagaaaactgcgaaaacaatctgcgagaaatgatacgccagcactataaccatccctccatcatcacttggggatacatgaatgagatattactcgtcacccagcgccgctataaaaaagaagaagaactgaaacccgtgctggaacggacattgtcactggccaatcgtttggagaaagttctgaaagaagaagattccactcgtgtcagcactatggcttttcatggcagtaacagctacaatgaggtaggactgggcaacatcaccgatattgtcggatggaatctttaccaaggctggtatggaggagatctcacaggcttcgaacgtttcctgacagagcaacacaaaaaacacccttctcatccgatgattgtcagcgaatacggtgccggatctgacaagcgtctacattcgctgcaaccgcacgcttttgatttcagtatcgaataccagcagaaatacctggaacactacttaccgatattggaagaaacgccgtatatttgtggtggaactcactggaactttatcgatttctcttctgcattgcgtgatgaatctatgccgcgcatcaacaataaaggactggtatactcagaccgcagtccaaaagacgtgtactattactataaagccgcctggcgtcaagacattcccgtgttacacattgccagccgtgactggacgcaccgtagcggtgtacaacatggaaaggctccggttccgctacccgtcaaggtatataccaatcttccggaagtggaactcttcattgacggaaaatccttaggcaaacagaaaacagagaattatacagttacatttcaggtaccattcagccggaaaaagcacttcatcttcgcccaagctgaaaacaaagagtcagatcaaagcatctccatgatagaagatgccctccacatcaacttcacccctatccctgcaaatctgaatgaaacaaacttacggaatctggaacttgccgtaaatgtaggcagcaactgtttctatacttccgatgaaagccagctcacgtggctacccgatcagccctacactgaaagcagttggggatatatcggcggagaaagcaaaaatagccagacacaggttgagaatacccacgacggcccattgtttcaaactcttcgcaacgaaattgaagggtattgtttcgatgttcccaacggagtctacgaggtagaatttctttttacagatatcttccgcgaaaatgcagcaactgtttaccagttgggccgggaatccggtgtagagagccgtgaaaatatcttcgatatagttatcaatggtgagagcgttgaagagaacttttctccttgccgcgaaagcggttatttccatgctctacggaaaagatacaatattacaaactttcggaataaaattgaaatacgcttccctgttcggaatggaaaaagctttctgaacggtataaagctcaggaaactttattaacttcaaaacaaaaacaccatgagagctaaaatttgcttagttattaccagtttgttgctcgcagtagtcagtatacatgcacagtccatctgggatgggaaacatctggagagagtaaaaaaatcattacatcaaccgtacttttcggccgcctatcaggagctgatttcaggtgccgacaggctactggatgtgcgccccttgtccgtcatgctgaaagagaagacacccggtagcggagacaagcacgactacatgagtcaagcacgctattattggcccgatccctccaaacccgatggcctgccttacatcagccatgacggcaagtcgaaccccgaactggacaagctggatcgcaaccgcctcggagaaacagcccaacgtgtaactactcttgcccttgcctggtactttagcggcgacgagaaatatgcccaaaaggcaacggaacttatccgcgtatggttctttaataaagatacgcgtatgaatccaaacctggagtatgcccagatgataccgggacacaacaacaataagggacgttgttacggcgtcatagacacttattcattcgtagagatgctggatgccgtacagttgttagagaagtcggaagcctttacgcccaaggatgccaagcagctgaaaacctggttcagcaagttgctgacgtggatactgaatagtccgcagggacaggaagaagcccgtcaggccaataaccatagcacggcgcatgatgcacaggtgatagcctttgccatgtacgcaggaaacatgaaagtagcccgggaagtcatcaatgccattccccggaagcgcctcttcacccagatagagccggacggcaaacaaccgcatgaactacgccgcactctcgctttcggttactcacaattcaatctgtctcatttcattgacatcttcatgatggcccggaagatcgggatttccattgataatgcaacctccgaagacggacgaagcttctacaaagccatggactttctggtaccatacgttggaaaagatgtcaaagcctggccgtaccagcagatcagtgaatggaaatacaagcaacaggaattctgcaaagacctgtaccgcactttcctgctgaaccccgaacgcaaagattatctgaagctctataaaacccatcgcatcatcgactggaaagaccgtttcaacctgttatggatggaagccgatgatgtgaacaatgcctacgcctttgcctgcggacaactgcaatttgccatgcagtgtgctgccaaggcccgaaaagaggcagacaatcaatgcaagcatcgtgtaattccccgtagcatcaacaaagacggttcgctgcggatgatacatcctcacgattggtgctcaggcttctttcccggttcattatggcaggtatacgcctatacaaacgatgatttctggcggcagcaggccatcagcaatacttggctgatagaagaagccaaatggcataaaggcactcacgacctcggtttcatgatgaacaatagtttcggcaaagcctaccagctgacaggcgaacgctcttacaaagatgtggtgctgcaaagcgccaaaaccctgattacccgctacaataagaaagtaaagagcatccgttcgtgggatcataatcgcgataaatggaagtttccggtaatcatcgacaacctgatgaacctggaaatgctattctgggctacacaggaaaccggagattccatctactggaaggttgccgtaaatcatgccaatacaactatgaagaatcatttccgcccggactactcttctttccacgtagtagattacgatccggaaaccggtgaagtacgcgccagacaaaccgcacaaggctatgccgacgattccttctggagccgcggacaggcatgggcactatacggatataccatgtgctaccgcttcaccaagaaccccgcatacctgcaacaggcacgccacattgcaaatttctttttcggcctgcccaacctgccggaagacctggttccctactgggacatgaaagctcccggcatccccgacattccccgcgacgcctcggctgccgccatcatggcttccgccctgtatgaactccgcacttacgtttcagcagaagatggcaaccgctaccaaagcattgccgacaagatagtggacagcctcaaccggcactatcaggccgagccgggaacaacttatggcttcctgctcctccattccaccggacaccatccgggaggtgatgaaattgatgtgcccatcaactatgccgactattattatctggaagcattggcaagaaaagaggctcttaagcaataattagaactttttgagacggtagttcatctttttgagacgttttgtatggtgagcaaactacttttccactatttttgtagcacagagatattagaatcatttttataaaagaaaaagacatgaaaaacttattcgacattaaagacaaagtgattatcgtcaccggcggttgcggtattctgggtaaaagtattgccaactacctcgctgagcaaggcgcaaaaatcgtaattctcgaccgtgtagaagagatcggtaaagaactggaagcagaactcaaccagaagacggaagccctgttcctggtaacggacgttctgaacaaggagatactggaggaaaacaagaaagccatcctggaacgcttcggcaccatcgacattttgctgaacgctgccggcggtaatatgcccggcgccaccattgctccggacaagacggtactcgacttggatgtagacgctttcaagaaagtagttgacctcaatctcttcggtaccattctgcctaccatggcatttgtagatgttatggcaaagaataagaaaggtgtgatcgtaaacttctgttccgaatcagcactacgtcctctgacacgcgtggtaggttatggttccgccaaagccgccattgccaactacacccgctatatggcaacggagctagccaccaaattcagtcctgaactccgtgtaaacgccatcgttccgggtttcctgctgaccaaccagaaccgtgccctgctgaccaatccggacggatcttatacggaccgtgcaaagactatcatcgcccacaccccatgcggacgctttgctgaaccggaagaattgttcggaaccattcactacctcatcagtgatgcttcctccttcgtgacaggtgccctgtcggtagtagacggtggttttgacgccttctctatctaatactaactcataaacccattcattatgatattatgtgaacaaacctggcgctggtacggtcctaatgatcccgtcagcctgtgggatatcaaacaagccggagcaaccggtatcgtgaacgccctgcaccacatcccgaacggtgaagtgtggactgtagaagaaatcatgaagcgcaaagaaatgatcgaagctgtcggtctgcgctggtcagtagtagaaagcgtgcctgtacacgagcatatcaagactcagacaggagatttccagaaatacatcgataattataaagaaagcttgcgtaatctcggtaagtgtggcgtgaacatcgtgacctacaacttcatgcctgtactggactggacgcgtaccgacctcgcttacgaactgcccgacggcagccgcgccctgcgtttcgaacgtgccgctttcatcgccttcgacctcttcctgctgaagcgccccggcgctgaaaacgactacaccgacgaagaaaaggccaaggccaaagctcgttttgagcaaatgacggatgccgacaagcaactgctcatccgcaacatgattgccggactgcccggttcggaagagagcttcacactggagcaattccagcaggaactcgaccgctacaaagacatcacacctgaaaagctgcgtgccaacttgatttacttcttgcaggaaatcactccggttgccgacgaagccggtgtagagctggttatccatccggatgatcccccctgctccatcctcggcctgccgcgcattatgagcagcgctgccgatttccaggcactgatagatgccgttcccaacaagagcaacggactttgtctttgcaccggttcgctcggtgtaagcagctccaacgacctggaaggcatgatgaagcaattcggtgaccgtatcaacttcgtccacttccgcagtacacagcgtgacgcagaaggcaacttctacgaagccaaccacctggaaggtgatgtggatatgtatcacgtcatgaaagctttcctcgaactgcaacagaagagacaagtatccatccccatgcgtcccgaccacgggcaccagatggtggacgacctgaagaagaaaaccaatccgggatactcctgcatcggccgcctgcgcggactggcagaactgcgcggactggaaatgggtatcgcaaagtctatctttaaggattcccattaagcagtctcaaccacctgacgcgtccatactattaattacgggctacaaggcacctatcattcgtgcctgtagcccgtaactaattataaactattctatcggtgaatttatattattctacctattcaatagtttcattttgacactttgctttttatgcataacgagaatgccatatttccgtcccgttacagggaagaacaaaaagaaacgagcgaatatcggcatttcactggctgacagcgcaatacagaaatacatacaactctaataaaagaaaaacagacggtctgtaagctaaaaacagatggtctgtcttccatatatagaccgttcgtctcccatctatagatagttcgcattagatatatagattattcctgtcccatctatagattgttcgcgtcccatccatagttcctttgtgaaagaagtatagtttcttgcatacgtattgcatatacagctcgttttatgcaaaaaacatggatgtatattctgcatattatgcatccggagtctatttctgatattttcggaaaagcctctgtcactaaaagaatcattccggttactttttgtccggaataaagcgtaacgagtttcacttctgtacgaatcggaacctaaaaagaatgcggagccacctaaaggaccccgcattcgcaagataaaaagaggaaggaggacatatacacaatactatatgtcacttgttcaccttcaaaagatacgtttttttcatattcaacgttcaaatacctctatgtttttattccaagcttaaagaatatcaaatcaaatcgctacagcttcttcttacaaaaaggttcacatacctttcatcaagcaccttccacgataccggcaacgtataggtaaaatctaccttatcaccagtatgaatcatcattaccggggagtattctcccggctccaaattaggcaggatcaccaacacctctgtgtcggtatacttaaacactcttttaacatgtatcaatgtgcccttatcggagacgggagaaagccccaggtaaatagttccaagtgaagatagacacaggttttcacctgtaataacgaccggagcattcggagtaatcgtgccattacgcaaacccgtcaacggatcgtacacttccttaataacaggaacctttcttccgaaaatcatcgaagttccatttccttcctgcttcctatgatgtagctcagccgccattttctttctatctttcatcatttattctattccttattagttagtaataacagcttcttaactgcactacaaaattacatcacaatgcatatacatttgtggcaagaacaagaaagatcaagcatccgggttttctatatatgacggggcaaacaagctccggcacttttttcggaaatggggtatctctaaaaagaaatgttacgattttcgaaacaagtagccctcgaaaagtgttaaatagacaatagacaaatctctaactcacacagaagattatgataacaaacgagttaaacacaggattagtaaatgccgtcagagagaaactcccatccaaagacaatcttgccaatgctttaatggacattctttatataggcaaagaagctatataccgccggctacggggtgaagtacctttcacactgaccgaagccgctattatatccagaaaactgggtatatcattggataagatgataggcgtaagtttccaggacaatgctgtattcgacatgaatatagtgggcagcaacaagcctctcgaaacctactattccatgttggaaaagcaggtagaactgtttcatgcagtcgaggaagatgagaactcggaaataggaacctcttccaacatcattccccagactctctctctgaattatgacatgctctccaaattccgcttattcaaatggatgtatcagaatgaaaacatccgatgcaagcattttgaagaattggatattccccagaatatggtagacaaacaaaaggagtatgcccgaatggtatcccgcatccattccgtagactacatctgggacaatatgattttcagtcacctggtcacggacatccaatacttttgcagtatccacctcattacggatgaagacaagaatctcctgaaggaagaactgttcgtattgatagatgaaatggaagcactggccgcccgagggaaaagcaaagcaggcaacgacgtcagaatctatatttcgaatatcaacttcgaagcgacctatagttatctggagacaagttccacgcaactcagcctgatccgcatctattccatcaactccattacgacacaggatcccgagatgttccgcggattgaaggagtggattcaatcattaaaaaaattctcaaccctgatatccgaaagcggcgagatgcaacgcattcagttctttaagcagcagcgagaaatcatcagcacattgtagcgctttctttcgaataatgaaatatatccaaagatatttatcctatattgaaaacagatagaccgactatctgtttttttttcacgtttcaactatttccctaagcattcttttcaaacagaaaatatctctgccttgcacacatgatatcgtacatagaagtttcatatacaagttctatatttgtataagtcacaaaacgttctatgataattgattattaataaaaaagaagaaggctatgacaaagaattatattgtaaaagagttgattaatgaaatgaaagagaggattcccccgggacataatttagctaattatctgacggatacattatatatggggaaagaagcggtttatcgcaggctacgaggagaagttgcattcacttttgacgaaatagccgtcatttcccataatctgggtatctctatcgatcagattattggaaaccacttatccaaccgggttacttttgatttgaatctgctgcattcacccaacttgatggaaagttactatgagattgtagaacgctatctgcgtatattccaacttgtgaacagcgatgaaaacagtgagacatattctgccaccaacaccattcctttcaccctctactcatcttatgaatatctgtccaagttccgtatatgccggtggatctatcagaatgggaagatgaaaacgcctaactctctgagtgatatgcatgtgcctgaaaagatcatcaacgctcataaaaagctgagtgaaagcatcagaaaggtaggaaaaacctactttgtatgggacagcaatgtttttcagtctgtcgtgaaagagataaagtactttgccggattgaacctgatatccacatcggatgtcatgtacctgaaaaatgagttgcaacagttgctcacggatctggagcacttatccattaaaggtgaattcaacgaaggacatgaattatacatctacctgtcgaacattgattttgaagcaacatacagttatgttagcaggaaggattatcagattagccttttcagagtgtattccattaattcgatggactcgcaaagcccccagatctgccagatacagaagaactggatacagtctttgaaaaggcactccacactgatttcggggagtggagaggcacagaggattgcatttattgagaaacagaggaatattattgatgtattataagaaaggggatagttcagctatccccttcttataaattagtctatagtcctcacacagcgataatgaacccaagacaaaccagagtctgtataatcccacgattgcgtttggagttgaccattttcccaagcattgggactaggaccaactacataaaacttaccggatacactaacggtttgtgaccatagccaattatcaaccttcacgaatccacctgaccaagtcggcacagtaaaaccatcaccattataagaggtttgcatcccacctaaaccatagattagtaataattccctttgagtaggtaaccgccaattgcctgatctcccctcacattcggcctttgcgcccattccggtgtttaccttatccaccaaatcaacctcaaacttcggagccaccttattatattgagccggagattcacctgaagcaagcaatatagaagacttcacacctccactattgtcgcgtgagataatagtagctcccgagacttttggataacctccgctactggcaccatttctgacacatcggaagtattgtttatcccaatcccaaatagaattagttgtagttacaccacttgagaagtccattgtaaaacgtgtatttgaatcaataggatcgaccgatgaagaccaattccgatctgcaaaccatccaaatatattttgtccagcatagccgctgccttgatttgcatctccccccaaagcatcgcgataaacataggataatatcaattcattagcattaggaagtcgccatccatcccccacagccttacatatattatcggcttcagtaatatcttttttaagcccctcgcttgctctattttcatcatagtataatcgtttgtcgaaccgaagcggataaagatagaaaagtggttctccactatcagtataggatgttttttccgacgtcattttcaaatcaattgtagtataaaacggataatctatataagattcctgactcccagcacgcatcacgtttctaaacgtaattcttatcgttccacttttcccttccttccatttaccaggatgaagctttaatctgaaattgtatccacgaccaattatactcaacggattatattcaggctcttctggattatctacaacagaatactcccacataatattatccgtattgcttctacctacaactatatcattttccgaatcagacactattaaccctgttccatcatcaccgataatatccaactgttctatcttggtaatctcccaattattatttgtaaggagttgcaaatattgttctgctccaagatgtacttcataactacggggactcaaactttcataatactgaaatgagaaatccaacaacgcctgaacgatagtaaactctctttgtgcacctaacaatattccctccttattatgtaaagtaaacaataacttgtctacacgccaatattcacttttcccatcgccatccactttaactttcggctctacgctaaaggcctgtacactgccgtaaaacggtgtaattgtcactctatccggattcagagccggaattaaacctccccaatccgggtacgctattaagcccgcaaaatccctgcccggctcaagccgcgcatcaagtctatccgtagaaaacatcacatacacagattgcggctcaatggtattagcggcaacattagttgccctaaggcgaaagaagagattctctatttcatttccgtatgcatccacaaacttgattacccccggctctatcatcttctgcgtcactgtaatctcctgggaaagcctcgccgttttcagcagaacagtccccgtacgagtgtcaccgattcctaacgcattatcaaaataccccatactcagcttaaactgtgtatcactatttgatgcgccagacgttgtaacattcccaccggtagtgccatcattaattctgagccaactctccccacttgtaacggtaactgtccagccgccaggaacatcagtaaatacatctatggcatattcgctaatctggaattgagatatctgcacatctgttacgctcacaccaagcatatactgcccattgtagactacatcctttattttattacggttataactaatcacacgcgttttcatgttagacattactgtataggaagccaaagcgtcaactttatcagtaaaacccggacctgaaacctcattaatgtcaacaacatatttgtaatttcgcatcaaaggcatatactctacctccgttccttcctctatcgtgaccttttgggtaaaatctacccgataatagtaagagtctccaactgcaactccattttcaatcatcttccccattacaatcagacatgtcgcattcttgcgacttgcattaccgtcctcacccactccaccggcatctattgccgcagaagcttcaagagcatagatttctccaatataagaggcagcgccattcacctgatacctaatagcattctctgcacccaaagtcttacccgggtcggatggcatattgggggcagttggtgtcaggtttatcttcccattactatcccattcaggagacacatatccatttgtgttgaaattggccagatatacatcttctatcttgaaattagaagttgaattttgtatatctatacgtgccaacattcgcttcatctcaatgttggctatactcaccgaaggttctatcttcgccacctctatctctccgtacataggaattgcggtgtaattatcagcatcagcaagccactttccgctattttgaaaaatcagactgttcaatacatcatttttgggagttcctttcgttaaaccggaaagtgagcaatttgccactaccgctatgcacactttcttagaagagagagtaagcggagctgaaaaatctacctttgagctacctccagctaaattctgctcaatattctggctttccacttccacccattccaaaagaacagcaggttctactgaagcatcaaacaccagaatatctacactttgtacctcatcttctttattagcctctcccactcctaccattgagcgtgaagcgactgacggcattttcacatcgaaaacagacagactaaattccacgctgttttcagttttctttggaggagtcgcaaactcctcttgtacacacccactgaggcataccactgtcatcagagtatacatcaacaaatgctttttgaatattgaaacagtatatctcattataattttctcttaaaaaggttcatatatctatgctgtagtagacgcatcgtccggtacagttaattctatctccacatccggattgtcaccatttgtattgtgtaataccagcgtggctttagatccctctgtggcattggccttgtaatagaagtaaagccaaccaccacctgtgccatttgccaaaagcattgtttcagcattcagcaaaatattatcaggatctcttatttcgcttatttcccaattccagttccaactgtctgtagagttagttaaggcagtcgtgttaaagactattttacgccgccttttgattccttctgtagtgggatcattatcggcaaatacgatatccggggttatccagttgccagctccaccccactgttgtataggtacaccaagattcatgttaccggcagtaatataaaatctcatatcacgaaagtcggcaacagtaccgacatagtcacttatcacggcacgaatagtataagtatatacgccattagcttcggacgaattaagcaggctaacttcagaccaagctgtattggttactgttaattgcgctcctgccggatagcctgtgtatggtatcgcattatagttcgtttttactactatatccacagtattacctttcccttccagtctcacattagcttgtgacaatttaagataatactgtccgtcaaaaatcacatctattaccggatttttatcccacggaagcggagtagccgatatctgatagattgtattcgagattgtaatgttatagttgatgtattcacccgattcccatgaatgaggtttggtagcaacaatatccttgagcataaactcccgctcacctaaattagtggtaacaacaatcttcgcctcatcggagaattgatcggtaggcaacatcaaaaatgtgtcaccaagcaagaccttatcatctgttaccgtattattactgctgagagtagaaacgatatttcctgtagtgacgtcattccacacaaagtcaggctttccattcgctgttgtcttggcaggtatagtgcccacagtaagtttaccaacattcggcacaccctgaaattcaatcttctgaatagttaccacatcaggtaccggatccttcttttgaaacgtaaaagtaactttggtcagagtatgataaaaatgtatacccacgccttcattccagccgggtgtagatacggcagccatcacatccacatgattggcagcatcagcatcagccgtataattcagcaacatttgtgcagggttagcgaaagttgcggcaggcgcatacgtaccctcatatggataccatgaaaagaacttcatgctggctcccagcagggccggccagtattgttccggcaatatcgtgcccgttatgccgcccgcattcacccgggctttttcgttgaagtacatttgtgtagcagacgcagcaggtgtcagggaagctgaaaagccgaataattgattctccagatcggatacggaagagacaaccgtaccacgggtaacggcacctccatcttctccaatacgttgcacaacaatctgatttccgcacgtcatttcttctctgatacacgaagagaatatgaccggaagaataactgccgttacaatcgtcctgatactattattaaactttatcatcctattccttttccaattaaaaaacattcgcccgaaagcatcacagatacatatccagatcaatatcctgaaccttaccccatccttccacacttatcgttattatctgaataccgatttttccaacccgggctgtgatttgatacacattattcctccggatctccgtaaaaggttgcgctgtcggagtacctgaattatcgacttttgttattgtttctatcaccttccctgctattcctgtaacatctggaggtcctttcagaacatttaccatgctaacagccagccgatcggaagtatctgacctgaaaatacgctcggcaacataaaatgaacagagtatttttctattttcagctccagctacagatgaatacgcccaggtttcagttgttgcagctgtccaagtctgcgtcagcaaatcagcatctactgcgtttgtcatcactttcccgtaattcttcgaagggttagcgttgtcacgcgtatagttggcctcatttcccatcacaaaataactgttatgggtgaagttgtgtaaagtgacactggtgacatcctttgtgtatcctgttacggctccaccgtctgtagcttcaaggaagatatcaacgcgagccacagcacgctcgacaaccatttttaccgccttgacttcatcagacgccacggatatatccctgattaccccagtcattggcataccggttgaggaaacaatctctccgtcactgtctaatatgttggctatatcatagtccacactctgcaatagccatgggctagtgacagtattgagcttgctcgtaagactttgtggctcattggcgatgacaataaccataatatcgttgttaggaatcacttcgaggtttttcgcagttatatcggtggctgtggccggagtatccaacgtaacaagtttattcacattcagcttcacgtcgcccgacgcattgctgaacacgataaaccggatggattttatttcctcctgccgctccacttccgatttatcctcaagtccgatgctaagctgcgcccgggtaacagggagcagttcatcatccatcgcatccttgctgcatgagaacaaaagggctgtgaaagccatacaaacgatatatagtattttttccctcattcttatatttcgatatcatgaagccaataaatccagggtcctacaagaagaccgatttgaaggaatcctcctcccggcttttctactacggagaacatcaggctccattcgctctgcctgtcaagatactcctgaaaaggaagcaccgtaccgtcatgacggtactccggccgagcaatactcaacagtttcatcaaatcatagctccacacttctgttcctgtatccgcatttcttataataaaacggtaatcccatcccgtccggttaaacagacgcatagtattcatacgcgctgacattaacacttcagaggtctcacccggtcctgaataatgagacgcgtatgtaatcggtccctgacctgtaggctcgttttcccaggaatagatggcattttcaggcgactggatttcaaaagagtactgattctcagtttcttctcgaccttcataatccatcaacgcaatattaaaccggttggtgttacgtatcatgtttacctgataaacattgtgactggtattggacggcaagtgattcacttccacaattgctccgaaatagaggtgtgggaactcaaaatccacgatatccgattcacggttcagagctaaagtgacttgctgataagtggtcgaccgcagagccatcccgctacctccatttcctaaagcgctaaatttgtcggacagtccgcctacagtcagcactttatagttgccgaagtccagttcgtcagtcaacgacattcggtttccaccaatcagttcagtagattccgctcttttagagagaaccagtttgtcatcactatcaaaaacaaatacatctaccgacttaacctgcggattgaacgcatccgcatattccatattgtagtcgaatgtgaattccagccaaagttcacaccgaggcaaatcctcacgtatactatcgcacgaagcgatgaacaacagcgaggtgacaataaagaatagcgatttggtttttccgaacatatcttttttcttttatgaggcagtgctttgaggactgccgtttatattgtcagagatcctgcttaatgatctccggttatttccattttagggggcgcgcggtttgcactccatgcatttctgatgcgccaagatgtttccgtgctgtttttagaaagcctgtcaccggcttgttttactttttcctacggttcatttccgtatggaatatcattaaaaaaaatacagggcaggcagttttgcactgccctgcgctttttcatagagagtatattaaatctcaaaaccagtttcccaatatacccacggagcaatttcgatatcgaatgcaaggaatccgggcttttcatcaattggtttttccggttctggatcttctggtccgccgccaggataccatggagtaccagaaccattcaccttattcagagtaaggttataccagttattacgtactacaccatatttaccaaagtacatatattcatcatcagtattatcatggcgaatctcataatagtaatagttaagactcttctgataccacttaatacacttggcaattttcacaatctcaccaccatctgttatattatcaagatgcgtgtcttgatcaagatctgcaaaagtggcaattgaagcatttaatgctgcatttaccgcacctaggaaattatcgcaaacttccataagcaatgtttctacaggatagaagagctttgcattcgccagtgcatcgaccggatcctcccctgccaattctaattcatcagccttagccttaatcgtggcgccagctgtagaatacgcaagctgaagatttgcaagagtcggataatttataccaccgaaagagaaccagtcatttccgagtgtaaaatcttttggagcatattttccttttattactacacgtgtagctgcaccaaacttctggtcggcatcagccattgtattctcaatacaatattcaaaaaccggagtcggagttgtacttgcttttttccaagttacaaaaggctcacgatcatcaagtttgtttagaacaatcccgactatgtgatctggatccgcaaagttcggatccgtagtatagaaactattctcatagaaggttgcagtatgggtcgctttagtcgtagatttctctgcaaatggatagaaagtactattgtaataatcgagtgtccaaccaccaaattcaaacgttgctccttcaggcaatactgtcagaccgggtgatttaacagctacctccacttttgcagaaagacgttcaatcttcaaagttgctctttttcctgttttttccgcttcctctttggctgtggcttcatctttaatggtgctaccatcaacagttaccacattcgcctctacgtcaagcagacagccctggttccacttgtcaccactaacatcgtaggaaccggcattgatcatcgtaaaacccttaccaccatccgcaggatccacaatttcacctacaagggtctcaggtttgctgccagccgccaaactattgacgatagccatgttgatatcagtatacaaagcaccggcagccaaagccttcaatctcgtttccagcaatgtacccggattaacgacaacgagcaaatacttggtactggcacttaccagaatcgcatccgttgtaccctgattgccactagcttgtagcgacaaatcgcctgatcccaaaactataacaggactctttctggaatggtgtaccagcttttgatccttgtcgaatgtaatgacatagagagaattgactttaccttcattacctgtaggatctttttccgcagaagtacctgccgcacgggtgcttgccttctgactaggcaatgtaatccgcaatgacatgtaagccacatccaaatcggcccccgtcctcgtatcttctccttccagctcatttgttgagcaacttgccagtgccccaagggccagcaacgatactaaaattgatttaatctttagcataatacaaaaatttattagaaattaattgatataattattcactttaatagtaaccgctttcgggttcttatttattattcgtttatttactctttttcctgatctcaatagcattagctttcttcttagctaattcttccaagttgcttttggctacatccagccccaactctttggcaatctttaaatgtttctctgacaattcataatcctccttcattaatagtaatactcccattgcattattatactccggtgaatagtctgctgacttcaccctctccaaatagcgtttcgcagaaaccagatcattgcgtgacagggctgcggtagctgcattcatattggctatttcactctccggatagatacggacagctgtttcgaagatatcgataaactcctgcgaacctttcggatacgtattagccaccataaacatctcgttcaaactcagattctgaggccgtctctttatcacttctttcgcctcttccagattgaaattcttaatatcataactcactttacagatcgctacacgtagactcggaaaaatattcttcaacatgaaccggtatggcacgccactatgtaacttcatcagcttcgtctctcttcctttctctatcggaacattctcaatgatatccagcacttctgctttatcatccatttctatggtagcaagcgccttcaccaagccttcccagttttcacctccaaaccggatatgatactggttcttcgggaaatcatactgcgtagccagatagttacgcaatgccatggcacggccttcagacaaacgtttattcgcttccagcgttccttcaggagaagcatagccaataatatccaagcgcttcacattcacattcgcatcattcttcagatcgtcaatcatggcacgtatcttacccagttccttgggattattcatatattcaggacgaatatccactctgttcaccacaaagtccaagaaacattcagcttgtacatcacggctttttatctcttccaccatcggttctacataagacaaatagggggtcactacatatggcaccagcatacgttcaagcgtaaccttatcaaaagcatattccacattcatcaatgtgctttcaccacaaccacattcgtcacgttgcacgttcaaccgggcatctgccatccaaggttcatagggtaacgcatatctgtattgcagcacaccactttttttcttgtaattcttctctaccagatagggaagtctataactatccttctgcttccagctcattaccgataacctgcgttcataggccagatactcattccgtcctttaatagatattctcggaagatcgcgggtggtagtagacgaaatcagctgaggaataaaatccactccacgtgcagacttcactttcacatcatccataatgacatccagatctatatggaggaattcacccgattgttccaaccgcacaggttctatcctaatagtaccttcgtatgaacggtcctgagccgatgctccgttcacattcaggaataagagagccagtgccagtgcaatgaattgcatatttattttcatcattctcaatctatttaattaagtaaataagtgataagctcgcttttgtaggacccagataatttttgctggtatctttcagtttggtgccacacgttgcacaaggatatttatcatataaaatacgtgcatatcccagtccgatagaagcctcaagactccaacgcttctttaatatccatgaatgcccgattgaaagcccaccaccatagagacgtccttgatagcgcatgttctgcatattctcgctgattaacggccaatctggccatccacctacattgaagtcggcatagtgcgcatgcaacccgatgaacgtacggttaaagctttcgcagaaccagtatcgaagctccggctgtataccccaatgcttcaaacgggcatcatcaaacttccatggattatagttgaccgggatatccagtgtccacttacgcgccaaagcaacttccaaaccaagattcatagtagtagtggcatcataaagcaggttactttttacggcaaccttttgagctttactttcaaccgacaataaacccaatatgaatagtatgcagactagtattttcttcatttattccttctttttattttaaaaccattctataaatccaatttcatgccgtgaaactttgatgaaggagagcattctttaaagaaacattttatatctttgcactctccatctattccatgcttcggcatcccgacttcattcccttcaaaccctgaataacaaaccgaaaaaagggcaaaatctcagattgcaaatatcgtggaaataaagaagactggaaatcgtatcaagttctgttataggcactaaaaaagaggccacacgactaataatgctattgagcacaacaagaatgacccaaataggaaaaaagagaaataatcaatctactttttctctatccgcatatctttatttattttgtttcaatattcgaaactttacgaagagaataatccaaactatttaatatatgaaagagcaagaaataatcattaaatacaataaagacataacataatatacaactttattcttcttacctgcaccatacgccattctcgacttgattacaaagaaaaagagcacaaattccacaaaggacaattttgtattaattactacattatatgctttatagtcttgcctttattataaaataaatgtgttgtcatctttttcttgcagactgagcgattattcccccggtaaacactacctttgctatcatttacttattaaaacagaatacgatcatgagtcccgactttaactacagcgaagtgccgaatatcttcctccactgcctcaacaagcaatgcaaacactccgccaaatgtatgcgctacctggtgacagcctatgtcccggacaactacccggtaatcagtactgtaaatccaaactattttagttctcacaaagaatcctgcccgtacttcatggcggatgaaaagaaacgtttcgcactcggcatcacccacctgttggataatgtaccgcacaaagaagccctcggcatcaaacgagaactgatggcagagcttaatcggactacctactaccgctgttaccgcaaggaacgacttcttaaacccaaagaacaagaatacatccgtcaactgtttctcaaaagaggaataaaggaagaacccgtatatgacgagtacgtagaacaatatgaatggtaaacttctgtaaataagtccgatgccttcctctcccggaaggctctactgaaccggtatcgttccattgcgaagaaatatccgtttcactgtattggcatttttgtttcttgggtaaggcactcttgtttcttaggtgagacacttttgtttctcagggaagaaacttttgttccttaggcaaggcacttttgttccaacagaaagaaacgaaatggcacaaatagaggttctgtgaagtaccagtatctccctgactaacaacaagaaagggcgtaatcttgcgactacgccctttctcttgtcaactgaataacgttattacttcaattcaaaaggaacgattcctttgatatccgctgccgaagcggcgataacagcttcaaacttacccggttcggctacccaggcatgttgggcatcgtcaaagtagctcaaagcttctttatctatggtgaaggtaatttctttctcttcgcccggagctagtttcactttcttgaaacctttcaactctttgacaggacggggcagagaggatttcttatcactgatatacaattgcacaacttcctgtccttcgcggtcaccggtattcttcacggttacggtaaagctgatctgatcatcggcagacatcactttcttatcagccacaggtttgccataagcaaacgttgtgtaagacagcccgtgtccgaaggggaacaatggtttcaccttcttctgcttgtccgcccaacgataccccacaaagatgccttcgttgtatttcatatctaccacatccttacttctctgactgatatattcgccaacgctatgagccggaacatcttccagacgggcagggaaagtgaaaggcagtttgccggaaggattggcatcccccatcaacacggcagcgattgagtttccggcttccgatcccaggaaccaggcttgcaaaacagaagggacttccgcaatccaaggcatagctaccgcattgccggaaacattgatgactacaagattcttgtttgccttcgccaaagctgaaatgacagcatcctgtccgtacggcaattccaaaccagcacggtcggtatcttcgcaatcctgattgttactcttgttcagtccaccgataaagatcacatagtcggcatccgcagccacctttacggcttcggcaatcagctcctcaggcgtacggtcatcctgtagattctgaccggttaccacaccattatattcgccacgggcatcgcctacgtatccacgggcataaacaacttccgccttgtttcctacgcggttcttgatgccatccaacggagaaagttcgcgctgcaccttcagggaggaactaccaccacctacggtcatcattttcacagcattctcaccgataacggcaatcttcttcactttattcaagtcgatgggcaatacgccgcctttgttttgcagcagcacaatgccttcttcaccaatgcggcgggcagcctcgtaatgctcgggagaaaggatagagccgaaaggacggttcacatccattgtagtgcggaatgccaggcgcaggatgcgacgtactttttcgtccagttccttcgtacctactttgcccgatttgatacgctccagataaggcatagccagataatagttatcataagcgttgctgctgccattggcaagaccatccgtccagcttccgaactccatatcaagaccgtttgtaatagcttgatcggtatcgtgcgtgccgccccagtcggaaacgaccacaccgtcgaagccccattcgcctctcaggatatcgttcagcagatattggttgtggcaggcatgctgacctttatacaggttataagctcccatgatagaccacgctttaccttcctgaacggccgccttgaaagcgggcagatagatttcatacagggcacggtcgtctactatgacattggtggtgtggcggttgatttcctgattgttcagcgcatagtgcttcacgcaggctgccactccattctgttgtacgccctgcacgtaaggaaccaccatacgggaagccaggtacgggtcttcgcccatgtactcaaagttacgtccgttcagcggagtacgataaatattaacaccgggtcccagaagaacggtcttgttacgatagcgtgcttcttcaccaatgcttttgccataaagcatggacatctcggggttccatgtagccgccaaacaggtcaatgccggaaaagctacacaagagtcattggtccatccggcctgattccattcatcccaaagaacttcgggacggattccgtgaggaccgtccgtcatccaaaattccggaatacccagacggggcacacccggactgctgaatttactttgtgcatgcagcatggctactttttcttccacggtcagccttttcaacgcatcttctactcttacttccaaaggtttgctcgcatccagatatacaggtttctgttgcgcaaagagcggaagagcaacagcgaatgcgaaaccgaataatactttcttcatataaataagtggataatggggttagtagctaagtttatttctttctgacgggttatgaatcaattcaccacagattaacacagattctcacagaattttatttctctgatttttaattaattaaactctgtgagaatctgtgttaatctgtggtgagcaaattcattactaatacaattataaaccaaactcaactactgactcacatgattaaatatttaacaatagcttcttacttcattcccaatgatttaatatacccttcctgcaccacacagtttttcagcttgcaagcctcgatgaaatccatcatggctttgcgagccattgcctggtcgggacgagcatcacgaacttccttataagatgcgcggggagcctcggagaagtaaacgatattcgcccaattctccggaggagtaataccgacgaagctagaaccatccatcttcttatatggccagaaggtatagccaatattattatcacgcatagtctggcagaatgcagcttgccattcatccgtattatgtcctatttcgcccatatacatcggcaggttcactttgtcacggaaatcaataatactctggatagcttctttagtaggatcgcctccgtagcggtggcaggtgtacattatcttatcgtcgaacttagaatccgtaaacggcttgaagttaccgttccattgcgcaccgcccaacaggataatatggttggtgtccacctcgcggatagcggctactcccttcttatagatatcttccagcttaccgttcagttcttccatattcgggaagtacggagcaataggttcgttgaaaagctcataacccagaatcaccggttcatttttataacgctccgcaatcttgcgccagatgtcacaatacaactgctggctggtttcactttcaaacaaccagggatagccataactgtcgtcaatgttatctcccgtttgtccgcccggagcatcgtgcatatcaagaatcagataaagatcggcttcacgacaccattccaccacactgtccacccgggcgaaaccatcctgattggctgtcagccccataaagtcctcatctgtgaacaacttatagtgaaacggcaaacggattgtattcgcacctgtattcttgatgaactgaacatcttcacgggtgatgtaattgtccttaaacgctttccagaactcagcggtaaagtcgggtcccaccaactgacagagcatctcgttgatgaaacggggggaattcgtcttactgaacttaaacatatatccttccggattcagccaattacccagattggtacccatgataaagagtttcgtaccgtcgggctttatcagatcttgcccttgaattgttacaaacgcggcaggttcctgtgctttttctgccttttcaccgcagctccctaacatcaaagaagctgccaagagggatgtacccactaaaatagatttcaacatggtattctaaatataagattatttcttccagcgataggatgctacagacttggcaggcaccacacaatccacacagttctttccgtccgttaccgtcaggcgggcttccgtcgtaccttcgttcaacagcacaaaagccacggttccatcgggattttcgaatgcagagtacatcaatcccttctctgcaacgcctttgctttctatgcggatagcgcccggtttcactacggtagacagatgtccgatgatatagtaatgggagttgtaagtcattgttttatagtcgtcacgactgatatccacggctccgtaacaagtcttgcagccaccttcacgccaaggtccacgttcattgtccagcatcagattccagactatgacacctttacaccagttgttcactgtgccaagggctacttcacgcatatcttccatcaggcgtttctccaggttacgaccatcattccacatgccgatagaagtttcggtgaagatcagttccttgtcagggcgcttctgttggatattgttcagttcttcgcgtctgccgccataattgtggtaagcggctccggtcagaaaagcggcggctacttcatcatcatacatcttaacggggtattgttgctgatcggccatattatcgtagttgtagttatggtcgaaagcataaatcttcgtatccagtccgacagccttgaaagcagggccaagagcgtcacgcacaaaggccagttcttccttccaacccatgaacaaagatgcggaatttcccctattcaacggttcattctgtggagtaacggaataaatatcaataccttcattacgaaatgcctcaatccatttcacgaagtaagtggcataatcctgatagtaatccggattcagttgtccgcttgtccaggaatcgaagggtttcttttcctccaggttattcaccttcatccatttggggcatgtccacggagagcccagtatcttgatggtgggattaatcgccaggatatcttttaagataggtatcacgtattctttctcttccgtctgtaaggcaaagttttcaatgcccttcgtatcgcagcaagtatattcgctcagcgagaaatcggaacagcctatggaaatgcggatatagctgaagcctagtccgtctttatccgaaaaagtttcggtaagaaactccgcacggtcggcaggtgtcatttgcatcagattgtagcaggtagaaccggtcacggcagcaccgaaaccgtccatctcctgaaatttcaccttcgaattcagggtgattacggattcaaacgcaggagttttagagagcttctgagtagtgtgattaaagctttgctgacggtcggcagtcgtgatgtacacatctgctttcttctttcctgccgcattttcgtccaatgaagcggaaatctcggcacaagctgtaatggcagcgaataaacagcatcctaataaaagaggtagtttcaagttcatggtatgttttccaaggggtaattaatcttccccaaaggtaggcaagataaagacagtatgcacctccggtttatcaagatgtggataagatgaaagcatgcggaatgataacagactaaataacaagactataagtttgcggtgagaaagtaaaaaagtggatgaacaggaaagaaatggcgtatgtttagcgtatcctcataacgcacatttcaaagtcatcccgcgagacgcacgccttatttttcactttagcgcggtaattatagattgtattgacggaataacgaaggaactcggcaatctgcgaactatcgtcaatacccagacggatcaaggcaaaaatacgcaattctgtattcagcagttcgcccttgcggagaatgatccgttcttcaggctgcaacaactgattgaacttttctacaaagtcagggaaaagatggaggaaggcagtatcgaagttctcgtacagttccttcagatcagtgtcaagcacatctcttgaacgcaccatcttcagcaattcttccgtttgtccgccggaaagcttcttgttgaccatgcgtcggtaagcatccagacggtcgatataagtagaacacagtttcaggaaacggccgatatattcctcctttatatgattggacatctgcaactgttcattggcctgttccagatgactgcgggctatggaaagatgcttcatctgccgatatatccagatgacagccataatcagcaacagggacaggatactgatcatccaaagataaaagagcagacggtcgttctgcttctcctgcatagcctgataggtaagatctatgagcgacagaatacctgccgtctgcaagctgcggctacgggcattgtagtggttggtttcatcccacgagaagcgaatgtagcggtaagcacgttcaatgtctccttcttcataaagcagttgcgccaaggtccacaaggaagcatgatcagtaattgccagccggacatctgtcaaagcagacaaagccagataatacttttcctgctgcctgtctcccaaactacggtaaagctgggaacggtggtaagtgaccaacgcatattccggggtatcgggacgtatgcccgccaaacggctatcatttatcttcaaagcctcctccaattgaccggagccggcggctttcatctctttacgttccaggtagagggcggaggcaggagaaagcacctgcatcagagagtctccataagcgacagacaaaccgtaataacggctgcgccggaaggtatcctgcgtatacgcccccaattcattgtataaatgacggtaacattcataataatcgggtagcaaacggggagaaagcttagagggttttatcttttccagatcttcggaagcttctttatacatacctgctgctgacatcagatgcgccctccggatacgggtttcatctgccgcatcctgctcaccgcgctgttgcgcccagcgcaggttacggctcagatagtaaagggcggagtcgcagatgtacgctttgtattcctgatacatttccgcattcagccggaagaattccggggtttctgaatcggcctgtaccaattgctgcctcaacgcctcaatacgggcttcacgcactgccacatattcttcgtgcttaccgatggctacgtccaaagcatcagtccagccatccattgcaggaacatcggccggagccgacattccgtgaatgccaactaaagccagacctagaaatatcagcagttttatcttcataggggacaaatataaaaaatttgtttcctatatttgcagcattaacccccaaatgtattctataatgaaaaacttaacacctcaacgagtggcggcggtcgatgtattccgtgcgcttactatgttcttaatgctctttgtgaatgatatccccggtctgaaaaacatcccccactggcttaaacatgccgaaatgaacgaagacatgctgggtttttccgacacaatctttcccgcattcctcttctgtatgggtatgtccgtttcctttgctatccagaaccgctatcgaaagggagacactaccttgcaagtgatcgctcatattttctggcgcacggtggctctgattgccatgggactgttctcactcaactccggcggcatagagggcggcatctcccatcaatggttctgcatactgatggttataggtttctttctggtctgggcggtctatcccaaggccgaaggttcaaaaaagtacctattcatcgcaatgaaggtgcttggtgtggccctgctggcattcctcgtattatataaagacttaaacggaaaacctttccatcagggttggtggggcattctgggacttatcggttggacctatgtcgtatgtgccggtatttatctgtttacccgtgaaagtctacgcaagaatgtaatagcatggctggtagttatgctgcttgcagtaatcagtcattccagtctgataccgcaagaatacggtttacgcgtcatactgctgcctttcatccccagcgattggacgttgcacgcattcggtatgtcgggtgtactcacttcgttgctgatgcagaaatatgctgaccgggaacatccgcgtaagtttatcacgattctttgtgtattgggtgttgtcatgcttgtcgctgcactctgctcgcatcctcactggattatttccaagatacaggctaccccgagttggttgttttattgcctggctgcattcttcccgctgttcggcttgttctattggctgacggatgtgaaaggcaaaacgccctggttcgatattatcaaacctgccggaacagctacactgacatgctatatccttccttacgtatggtatgctgtgcagcaattgctgggtttgcattatccagagctattgaacaccggtgctccgggcttattaagatcgcttatattctccctcatcattgtccaattgaccggactgttggtgaaggttaagataaaactgaaggtataaaggatttcaggtgcggattacgcggactacacggattctcaaagaatcggaaaggaataatttccgtgtaattcgcgtaatccgcgcctaaaagaaaaacaaaaaggattatgttgaaaatagaaaccccaaacaacgaagacaaagtactgctacattcctgttgcgcaccttgctcttctgctattatcgaatgtctgctcgccaacaacattcgtcccaccgtattttattataaccccaacatctatcctcaggcagaatacgatatccgaaaagccgaagctatccgttatgtaaaagccctcggacttgatttcatcgatggagattacgactatcagctttggcgcagttccatgtcagggatggaagatgagcctgaacgtggggggcgttgtctgcaatgtttcactcttcgcctgacggaaacagcccgctatgccgcagagcatggtttcacgctattcaccactacccttgcctcttcccgctggaaaagtctcgaccagattaatctggcaggtcgtcgcgctgccgctctctatcccggcaccgtcttctgggaacagaactggcgaaaaggaggattacaggaccgccgaaatcaacttcttaaagagcatgacttctacaatcaacaatattgcggttgcgagttcagtatgcggaggcttaaagaaaaagaataaaaacatccgatcacaacttatatttctccatcagtgacttcactgcatcttttttaaagtgatactgaaagagcacgggattatcatcctcagataaggaatcggccaactctgataaagccttacttcccgctgaatcctccttcttttcacaaaagaattctgcagatagataacctacgtgctcgtcggaactccctcccgtcaaaagtgaggaatagaggtttaagtccgaattataggtagtggaaatcaagattcccttttctccatcccagaccaacgtttttctgttatcaatcaatgcaaacaaataatcggaagaagcctctaaagcggttatgcccgtgcctatactccgctgattcataatctttagcagttcaaaaaagtccagatctttgtgctcatccaggaaagcctcatcaggaatggtagcggaggtatcgacatgataaaccgggaaagtcttgccattctcatattgataaagttcattagaaaacacagatgccaagaaatacttattgttgaaggtcaccattggaaagtacaagaaagggtaaaaagcatctttagttgtcaacgcctttgcatccattatcctttccgaaactaatgtatctcctttctctctgaagacgcgatactcactatccacatgaaaaagatcattaggcaaaggataaaatgctaaaagttctcctccatcacacaacattgccgactctatattggcatctttatccccaaggtagctcatagatatgtaagtgccatcatacgcatatcgtaatattcgcttttgtacattgttgataatgcagacttgcttattcttacggtccaaatagaaattatccatatagagatattccccgggggcatttcctttatgaccgatttcattcaggaaacgtccgtctttaccaaagacaaatagccctttagtatcttcgacaaaataaaaatcaccatccctcttagtcctttggagttcacccagcaagcacttctccgaagtttctaaaggaatataactaatgctgtccactatatcgtatatatccaattcaatagggcggtctttatttattatattgattgcctctaaactattcggcaacgattgctggcggcaggatgacataagaattatgactgtcactattagactatatgatttcctatttatgttcagcattagtttcatattaaaaaaaatctaaattaaggtatattataagtatagatcacatcttcctgttcttgacagacagcaataccggaggaatagaaatactgtccgcaaaattacagtttataccttaataaataatcttcatagtgtgcattagtcgcatatatatatccattttcttcatcaactacaaaataaaaaggaattatatcaaatgtatatttgattatcgggttcccttcataatcatagacctctaaagttctgcctaagaaattatcatcctccttatgtccgacatacaaagcataaaaatatttcttccccgcatagacattaagatagtgataagttatatcttcaatgtcattagctataatttcgggataatgcttaccatcattaattctttttaccaacttaaaatctttcacggcatagatatctatttgctttttatagatgtaaggataaaccacaaatgaatcatttgcagcaataattcctctattagaatagaaataagactcattatcgtcatctttttccagttttattttatccagttcagtttgattcttcaaatcatattttgtaatggcaagttgattactgctataatatataaataaagaatcatttataatattcatgaaattatattcatcatatttacccaattcatactcatcaataaacaataagttaccatcaggagctaatgatatttttctgattgacgtaggagaataacctcttatatataaataatcattatccaatgtatggcaaaacataggaaacatttggatctcatccggaccatttccttttatacctgtggcatttttaaatgtcaatgaaggagtcttatataggaataatgttgtgtcagatcgtgaacttgaaataataaaatagtctcctgattttgtgacgaaatcaggagaaaacatttcgcttacaggaatcttctctgcaaatacctttttactttcgtgaaaaatggttccatctacacgaggttgagagcatgcacttagcatccaagccattaagaacacacatgttgaattatatttcatctgagtctaaattaaataagaggtaactacattatatttgctgtatataccggtccaggctatccgtagcagataaggacaatttattctttatgcgctgtttggttttcaataccgactgggaagtaatattgaaaagagctgcaacagccttgttacagagtcgggcacgcaccagataacacaactttaattcctgaggtcctaaacagtaatcaaccaactcttccgacaggcagttcccataaaaccaatcgataacggtaaacagattttgccattcggtatcatccctgacaatgccataagacggatgctgatgaagtcgtaacaactggctcatggccaataataaagaagatgagcaatctaccaatactgatgcttcctgataatttttcagttgttttgtcagttgcttatttctgaacaataagcaagcattccaattatcactgtaagtttccatatacatctcttgtttttataatattttcccaattacttttccagtttctttgctatttcctctacctctctgcgcatctcctcaatggccgtagaatgaattttaggcgctttcatcagcactattcgtttcatctcctcaaacttctccctattcagaaattccggttcggcatatagcttcgccagcaaatagtaaggataaatccgcccgggcaaacgatgaaccgaagccagaagaagttcctctgcccaatggtagcaacgcagtgcctgataattcttgccaatgacattcagtatcattggatcagcgcaatataccagagccttatccagatatttattagactcattataaaaccccgccttatgaaggctatgcccatattcaaacaagaatgtccctttctctctcagttgcggatagagcttatcataagccgcatttgccgctgcataggctcccgcatgataaagcatacgggcattcacccagtcccgacaagcatccttttcccgctgccacttgccatgaaaaccgactatccatataataagacaagcagataaaacaaccggtttagctactatatcccctatcccacaagccagcaacaagcacacataggctacaatgaaagcaggaagatgcataggataagaagaaaaagaaaaaataagcaaagcgataattgcaccacacacaccgtagcgtctgaactgtatccccgcccataaacaggcaagagtaatcaccatcagcattatacagataacaggtccctgtgtcagaatcaattccagatattcattaaatgcatattccggacttccggccaccctttcttcccactcggcataatctccctgggaaaaataagcttcctgcgcctcaccataagcaaaagcgaatcccttatcacatccccaagggtacttgattatagcctgacaggttattttccataaaaacaaacgtcccagagcagagtccggcttcaagaagaaagccccggcacctcccactatcaacacaaaaaatatccctatcccataagagatatatcgttttttataccttctccatagtatattccatttacgcctatcccgatgcatgtatatcacccatgcacaacctatcacggcagccacccaggccgaacggctcattgtagccggtaatacgcaaagaatcagtactcccactactcccgccgccactttctccaactttaaagaagcgttcacccacttccatgtcccgaattgcatataatgatgcaggcagacaggtagtaccattgccagatatccggcatatggaccgggattaaaaaaagaaccggtgagtgcataacgaaaatgaccggaagcagaaaatccatacaactgacgtagtccccaaacggcttcaattcctccaaggagtatcagactccatgatacacaagcggaaaaacacgaaaaggataacatcttcttcctagaagaaccatcgaaaagttgaagcagacagactgcaacgatacaaccggtcgaaaacaatacagcctttccaaaccaaacccactgcccgatagtttctccggcaagaagttcaggtgttgttacgcagaccaggctcagtggagagcaaacagcaagaaaatgtaacaacacaacggctgtgtcttttattttatgtatccatatctttattctattctcttccatattctatcccatcttatcctatccttctccctatctaccgacttccatatcctgacagccttgcccacgattagaggttccggcaacagtccccaatagcgggaatcctgagagttcatcactttatcccctgtaacaaagtaataattctctttaaagcgataagcatatatcacactgtcattcagtaaaacggtatctccacgcaagaagagtttcttcttttgttcccactctattgcattcttatagaaagcggcatgttcaggattcatttccacttcatcccctttagcgggaagatacaaaggaccgaaattcataatatcccagtttaccagttcattataaggataaccactcatgacaattctccaatccctttctctcccattctctatgatacgcctcaacccatcctgagaatctacgtttcctaacggcatattacaaccgcgcactttataatgcgcctgacttatttcaaatgtatcgcccggtaatgccacacaacgcttcacataataagtcattaaattcaggccgatactgtcccaccgggccggataaggaaaattgaaaaccaatacatcgtttctcttaatcttgcctaaccccggcaagcgggaaatcctaacctcttttccttctgcggcatcccagatgttgaagatacgggcacccatcacccacttattcaccagaatgttatcccccggaagcaaagcaggctccatagagtccgaaggaatcctaaaagtggcaatacaggttacttgaagtaatacccacagagccactaatccacagcctatcaaaaacaagtttaacaacttgtcgacaaaccaagagagttttctttttttacgaaatagcttcattcaaattacaatatagctttatttcatcaaaccataataagctaaaaagtaaacttcaagaaaccatcctcaaaaaattcactgttatacccataaataattctattctcctcgtccacatcaaaagcccccggcataatatccaaaatatatttagctatggaatgaccggagtaatcaaaaacttctataatgcattcttttttctttccttggcctcttgcatagaaatagcgcttacccgcgaccaattcatcataataaaccagactattttctatatcaccaattactatacgtggaatgatattatcccctacaagccttttacaaagtttcatgctatccacactataaaaatcaatctgtttcttatacacatatgcataaataatcagagagtcatttgcaatcataattccattattctcataatagtatttttcaggatgatcatccggctcaaataaaatctgccctgcttcctgccgggtattcaaattaattttctttatggcaagtttgtctgtctcattatatatagagagggaatctctcactatatatctatcattaggaatatcactggaaataggcaattcgtattttttttcaaaggaaagatggtacgtgttatccatcctaaaactcttaagagagaactctgtgtatcctcctatataaactttatcggtcaatgttctccaaattctgggataaacttgaaactcatcttccgcttgtccttttacaccccctttataaatacacttaaactcaggcagagagtattggtacagcatggcatcatgatttctactgtccgtaaccaatatactttgctttttcagtaccatctgctctggatttataatttcatctactcttattctctctgcataaagtaacttttcctcaggaaatggttccatatcttgttgcaacttttgttctgtacatgccattaatgtgatacagaacaataaaaaacaaacacgcttcatacaataaatatttatattgttttattctcaacacactatgcacatttcacatcatcatacttctcgcgataatcaatacaggcaatcaacagcatcatgagacatgatatacattcaattcttttcataaataaacaagtaaaaaacactcttaaagacaaaagatacttacaatagtaatcatattactcagaaaactaaaaacaggttatatctctttcaaagagggttgccctgtttagccttctatcattttgcttccccggttatcctcaataagataggagaagaatctgcattacaatacacttttatgattttatcaaaacgccccggctgctctgccatatatgtcaccgataaagcgacagaatccttaggatgaaccggttcctttgaataaccgaccgtagtacagtcacaggaggttagcacatcatttatcactaaaagccgctcacctgtattctcaagaatgaactctaccgtttgttcttgctgccaatcaaaagcacccaaagacaagtcagtgctttttatattgatctttgttcttattccctcactctcggaagctgccttcccttgaattatattcatatataaatcttttattttagatttttatcggtttgacttaaccgattgagaaataaactattagcgaattatttgagaaatagaggtaacgatttggcaactgtgcgaatttcagcgttttgcgttgtatgctgtcaaataactctttcatttgcaaatataacatctttttccgaaagtacgaactgttggcagcaattttataaaatcaacttgcgaaaaacgaaaatcattcatcccatttacaagttggcatgttaagaacattgtccgctttgtcattttgttaccgggatttgtccgcatggtaggagaagcgtaccaatcagtcaagtatgttgtttcattatgtaatagccagctgttttttgtgtaatactccgatatcgctttctttttgatttcataagaaagcccccagcgaaaaccctgccggaggctgtttttaatctaatacattttcgggaatatcagttgcttttcttgttagataatattctgtattggtttctatatctgttgctctcattataataggtgctatttcttttgtctttggactttcgatgaaatcgtgccaatcccagcctaaaaaaagttttacaacagcaaacatagtttggtctgttcctgttagattatatttatatatggttctattctccaattctttatgataagttaatgttaagaacggaatatttccctttatggaaaattcataatttcctgtactctttatctttaatttatcatcgtacaagtagaaatctttatcgtcgttatttattaagaaaatttcatcaccttgcttatatggtgggcgtacagggttgttaatagacaaatgtaaataactatctactatctttattcttagatcagttgtttcatgtgcaatattgtcctttacttgaatagttgtttctcctttttgtttaggatatatatctaaattacccataccgatagggcttgataaatctattttgacatctaatatagagggatcttttatctcaacggagtaatctttatttccacttcgtatcattatacttttggctccgattagaggacgctcgtagtaatctttttcaaaagatagatgatgtatatcttctgttttttcatcatcactgcaatttgtaaagcagaagcatagaaatattagaaaaaaagtaaataagtttttgtttctcatgactttagtacttttattttgatttatagttccgtattttcatatttggggtatcaccaacatttactacagatgttgccgtttaatataatattcggcaagctgtttttatggtgtaacgctccgatatcgctttttatatttatttcgtggagatttttctttgttcatttgataccaaactttacgttgccattcatatacagccagtttttcatcatcaacattatttgttttctctatataacttctaatacttggagcataagggtacttggactgtattatatcatctaccaaatagccattcaatcctttcaaattattgaataaaaatccttgaaacattaggtttatatagtctttattcttatgtagatattgtttgtatgctttgtatgcatcagatttcatatagtctgttgctctactactgaaatttggcttttttagttcttcttttaaagccttttcaagtttcttgtattcggtagaatcttgtatgctataccaataatgttcctctggtttgcttattaagtctatccatgctttggcttcccaatagtcaatgttcattcttacagaatctctttgttctggagataattcatagtataaagaatccttttcccaaccgttaaaaacgacttcaagagattctgacttctctctcattatacctttgtagatttctagcagtttttggtctgaaaaggacgttatcatgaatgtaccgctttctattctgcaattaacttgcggagcagtaataatggaatcattaaatacaaatgctattttttccccaatagacttttctgtttcatcggcccatttgtttagcttatgtttgctgatttgtccgcttatagcatattttccgaaataatccttttcaagttttagcccaacgaaatcctttactgttatgattggcttagaggacaaactacctgtacttaatacgtgataccacccattttctttatgcgtaaaatcgtgttttgccgtatttggctgtgctttcattcttggtgaaaagaataaaagtgatataagactgaataagatgatatttgtcttcatattattttgatttatttgaaaaatagcatataacatactatcgctaataaaaacagaagcaatatacttgcaataaaatatatttttgctttgaataaacttgcattatcaagtgcttctttttctattgttcttttatgaatttcttccatttgctcaatagaaatattggataaatcatttcctttacctttgtttacaagatacttttgatgttcttttattctatctctgtttaatttacgaagttcacgattttctttatctcgttgtaacatatcgtttatgcagcctaatgttcccatagcttttaaatttatagttctgtattcacgtatatttttccgaaagttttttgctcgtcacgtatccggcatagctcccgatatacttttaggtgcaaatatagcgaaaagtgccattcataagacatcatgaacggcacttttttattgttttcctgcaagataaacggttatatcttcattcctctgcttttcctttgcggttgtataggtcggcgaatattctgccttagcttgtcgaactgttccttgaaccactcggcaattggctttcggtcaatggcaagaaccagtctcgtcccgtccgtggggtctttcacgacttgaaaccctgccttttcggtcgtgaatttccgtccgtgttcttccgaatagagttcccctgcatactccaacggctttcccttgacgagcgttgcggtctgcctttcatcgaatcccacaaggcggcaaaggttttcgattcggagcatttcacggaaatagggaaaccatgccgccgcctttgcgattaccgttttcagaaacgatatttcctgcttgtgccttgtgtccttgtctgttatctccctgctgtgcttctgctgcatttcccgtatttctcggctgtggtctgcctgcatggtctgtatcctgtcttgcagggcttcgatggtttcctcgtggtcggctatcttcctatgcagggcagtgttctccctctccaacgccttgaccttgttactgccgaaaagagaaccaacgctctcggctatgttggtagctgcggtggttgccgcccctttcagcttctcggtctgtatttcttttttcgcccgtcttagttcctcccgtgccgtttctttctgctgctgcaaatccaccacttccgctttgaggttgtcggagagtttctgtatatcccgataatactgctgcgtggacttgtggcgagccttcgagccgtctatgcccctttgcaacccgtatttcgccatcgcttcggcataggtatcttggtaggacttcaatttcagccgtgtcataatatcgtctgcgcacagcctcacggtgtcggtcggctttttgcggtatcgcttcttcgtctgttcctcccttttcctgcgcttacgctctcccttgacgatggggacgagcgtaacgtgtatgtgcggcgtttcctcgtccctgtgcaggtgagccgccacgatgttctcctttccgaacgtgtcggcgaagtatttcagattgtcggcgcaccactcgtccaaacgcccctcttcctctatccgcttcatgtcctcgtgcgttcccgatacgttgatgcggattgcccgtacttggttgcttccgattttgcgtgtcagcccagcttcttccaatctccgctgtatagccgccgaacggcctttcactccgtcggggtattcgatgagcctgcggttcaggtgcgtgcgtgtggggtcggcgttcttcggtatgatgaaacgctcgatatgtgcggtcgttccgctgtcgctgccgtgcgccttttccatgtgtaaaactacgaaacccatatattcttcctttcttttttggcttgtgaaacaatgatttttttgtatcttcgggggcggcaaatgccgtccccgatggggtgtgcagaggggcttgccccttgccttattggggaattttcagcgatacgtagtattgcggctcggaaaattccctaataagctacggtattttctccgtaaataccctgcggcgtgccgtccgtctgcccgtctgcctttcggcggtggcagtccctgccgcctgcttacccgtataaccccaccttattatttttccctttcggtcggtggtgggcggcggggcggtcgtttccgttttcaaaggctcttttgcacggggcggtcggatacaaggttttcccgataaatcttcctctcgcttcgctgcgagcgtatttatcgggaaacggcgcagccgcctgaccttttagccgacataaagccccgtgcttactttgcctttgtaaacggaaatgattgctccgctttcccctgaaaagaggaattgaacctgcaatatatatcaccatagtgataggtttgcatgtttgcatgctggtatgctggtacgtttgcatgttgatatgttggtatgttgatatgttggtatatcatcatgctttccaacggctgttgggcttgccgtccgaaacaaccgacacgaataccgtcgttttctcttttcgcccgtgtataatcctctctaataatgccctgcggactttcgccgccccgaacgattcgatacggaaagcgagggcggctatcgtttcgaggttgtaaacctccgcgctgtatctgtccgatatgcggataatgcgctttatgtcatatatactcaaaactccgcttttgcagagtgcctttatccctgcccgaaccgtcggggcgataaccccgaacagttcgcagatttctcgctcggtcatggcggttgcgcctatatcgctcggcagggagatattgccctgcccgtccatcgtgataatgttcctttcttctttcatcggtattctgttcttaattaaatggctcggcagatattcttctccatatcctccaacttgtgcgacaaggtttccatgtcttggcttatcttctgggcggtgattttggcgtaaatttgggtggtctttatgttcgtgtgtcccaaaaggcggctcaccgtttcgatgggtacgccgtgcgacagaagcacggtcgtggcgttcgtgtggcgtgcgacatggtaggtcaaacgcaccttgaagccgcattgtctgcctatatctttgagtatcttgttacaactgccgttgctcggaacggggaaaacatgaccgtcccttgccagccccttgtatttctcgatgatacgcttgggaacgtccaaaaggcggatgttcgattcggtgttggtcttctttcttcgggtgattatccacaggttgccgtcgaagaatgtttgcaggcggtcggcggtgaggttcttcacgtccgaatacgccaaacccgtgaaaacagaaaagacgaacaagtcccgtacaagctcgtgggtggcgttcttcatcggtgcgtccatgagcgtctgtatctccgtttgggtgaggtagcccctgtccacgctttcgggagagttgatatatcccgcaaagggattaaagggcaaacgcccgtcgttcctcgctatggaaacgatgtgtttcaacacaatcatgtagccccacacggtattggtgcggcatttcttctccgtgcgcagaaaatactcgaagtcgttgatgaacgtgaggtttagttcctttaatggaatatcctcacgcttgtaggtatggggcaggaactcccgaatatggttgcagaccgtccgataacgggtaaatgtaccctgcgccctgctgtgcccgactttcttctcgaactcggcgttgtgctgctcgaacagcttcagcaaagtttcctgcttgacgccgataccgagataggcgtctttgagtttggcggcggtaacataaccgtccgtctgcattaactcttgatagcggcggtttacctccacacggattttatctactgcaaggttgattctctgcgcttcgacgctcttgcccgaagcacggctgttcttcacgtcccacaagcgtgggggaacgtccatcttgcaactgaactgtttaatctcgccgtccaccgtgatacggcacatcagaggcaggttgccgttcggcttctcgctgcctttcttcacgtaaaataataccttgaatgtacttcgcataactcactcctttttttggttacaaaattagttcttagtgagttaccgacagctatgtaaatcaacgcaaaacgcagaaaaagaaccttttagcaagaaatttgcacccattacgggagtaacgaggtggtaactgaacttctgcgccgtttggcttcgaggtggtatttcgttggctctgtcccatagaaaaacaaagcgtaacgaacgctctatcagctaattcgctacgctttgcccaaatttactttttcgctatgtgtttattttaggattatgaacaggattcccaatagctattatcttattgcttttatctaacaggaaagtttgaaaggttatatcagagggaaaacgattcaaacgataaaactcatttttttcatcccaatatacaggataaacaaaattaaaacgatgaaaaatatcatttaactcattcttacgttccgaataaaaataaaataaaaaagaaacacgtccctttgccaatgagtcaacctcatgcatcaactccatccaacgatgtaattgcaatttacaactagtacatcccacagaatccgtataaacaacaactttatattctggattttcttccatcataaaagtatctttccctaagacagtggtataactctctgttggaaaaagaatttcttttccattccattcttttactaattctagaacctcctttttttcagagtttccacaaccaataaagcataaagcaatccatatacatattaaagacttcatatcatatttctatcttccaaagaacttatatctgcattttcaaaattatcttgtccatatgccacagaatctatctaactattggcatattcacttttcatttcaatcaatttctttcaaagaaagaatcatcttttccatttccggcaaccatttattccatcccgaagttgaagatgacacgaaatctataagataaacatttttccttccctgaacataccactttttcattctcatatatatattcttgcctgtttccaaatgtttaacaggcatacacaccagttctacagattgcttcactttcacagaaacaggtttatcccaagttactgtattataatattggctatccacaaaactcaagctatccatttcttgtattttcttataatccttacagcccttgaattctaaaacagaaactgaaactccaagattgaaatcaggacaaatcctagtcatacataccgtttcataccctgctattttccgtctcattggctttttactaatctgttcacttgtacaaagtttccagtctgccatcatatcaattttataagtatcacccttcattttcacataagaaatctgttgcccatcaacatagataccatacacaagcccaatcaaaagaaggactaattcttttatcctttgcacacccatcattatctaattcgctacagttcaaatttataaatagaattctcatcttccacgaacacaccatagaaagtcccattctgttcgtccacaatgaaagaacttatataacggtctaattgatatcgcttcaacgggtgaccttcccagtcaaaaagttggatactgggattgctaaccttattacttatctcatttactgtcatatccaaatttaaagtgtagatatagcgatcagtagcataaagggctatcggatgaatatacctattctcatcccttacatcaggtagttcttgacatggaagaatatctaaaacattgtccgttttcagttcaccattagcattataaatacgatatctgcgtaaatgttggtagaaaacagctacacaagttccatcaggcttagctgccaacaaactattataagcctgattacgcgccaacgcatccttaaacctaggttttacctcttcaggatacacacctaattcttcatagtttccatcaggataaagaaacctcaattcatactccgaaccatactctgtattgcaacaatataaagaatctttcaactccatcaagccattgaaatattgaaattgataaggcatgtccgtagaagttatatgaggttctgaattttcccaatttatagctttcaacttatttaaatcacttaatataaagccagattccgtatagctaacagcctgtatcgaaggtaaatggaaatcattaggtccttccccttttattccaaattgcccttgatactcaagctcaggcatactaaacacttgaaataaagtatctgttttctcattcaatacaatcaatctatctttcagaagaaaaagattccgaggataaagcaaaacaggagggatctctatttttgtactctttacagatatagtttgttcaaaaccactatacctattaatttccgcccttttatgggaacatccacaaagtaaagccaaaattaaaaacaaaacaatattttttaatatcataccttcatttatttaatatagatggttaaaactccagatttattatttaaatcattctcattttaaccatctctgatcatgcattataaaaattagtttctatagcaagaacgactgatatcaaagttgcgcccttttttctgagtacaagtataacaatctacaaatatttgatcactatgaaaccaatctgcaggtgtataaacttgataacattgattttcaccattgccaccttcaccacttgccaaagcttccacattagccaatgctagttcagacataacatcaggcttctgtgaagcataaacactatatcctgttactactgcaaagattacagcaaaaacatatttcaaaaaaattttcatcgtaaaattgttttaaattataaaaacgtttaattgtcaatatcaagcacaaaataatgttgtgcagcagagaagcaaaacactgaatatctcgctgagatcatttcatatcatgctgtcgtcacagctaaaccggtttatatttctttttctcactaagtgaatctttgtttttgcattggtaacccctcctttcaggtatttatgaaacaaaatcaccttcaatacaaaatagtcgttctgcccagctgtcattttgtttcggaattattctacaagatgaaaactgtattccattattgtctcttctgtagttgccaaaccacgcaaatattctttccacaccccatctttttcctattggtttaaaggtatttaccttatctccgtttaccacaatttcgagcatatatccaaaagctatttttatcttgtccgctatttccccacgataaccagcatcggataatatgattttaatgttgcaacaaagttccctaagattcctcgttaataaataaaccgctttactatcatgtacgcaggcaattgttaccatcacaaccgccagtagaaaaccattcttatcaactactacatgacgtttaactcctttttctttcttattcccatcaataccattgagaaagcaattatcaacccaacgtacaataatccccagactaacttctgcattttgttccattttaacacgtaccttttctcgtaagttactcaataacaaatcaaactcatccagagagcaccatttattatgttaaaggacttaactataacatgtatatattgtcatcatcgtatatttttttagataaacaattctatctataatatgaaccttccttataccactttttattacatctactcatgtcatattccgatatgggttcatctctattcacatctgtagcaacaatagtcctacattgctcatccacaaacataccataaatcacatgatccaactcatatttcctcaatgtctcccccatcaggctaaacacatacacataccgtcctccatccgtcatatcacctctccgtgccgcttctgcaatctccttgaatgtacgtccctgaaacaccgcatagatagcactatccgtcacctgcacatcacaaaaccccataattcccgtaggaataccatagccttccgcaactttgaacttcggctcaccatgcggaccaatacgcaccacatgtgtactatctttcaaattataaatttcaagcacttctcccaactgggtaacagccgccagaactccattccgaggattataatcaatgaaactacgccatgcctgtgccaaagcaggacgagcctgcatcaaagcctcttcattggcagaaggaatctctcccatcttgcgcagtagcttaccctttcggtttacccagcaaaaacgactttctcctgaataatcaggaacgataaaagtagaatcatcatataccacaaagtctaatgcccggagaatctctttatccagactcaccacttcctcacgaaggagtgagtcgccggataaagacaaaccatacctggttaattgcgatttatttgcatctaacgtccacaatgaatttccatcccaacggagattctcggcagaaagcatatcctccggtgaatctccgtgcctgcctaaagaagctatatatgagaaatcaggataatgaaaaagctgaatgaagtgctccgaagcatgcaaatccagtatagctacggtatcaccctgtacccgaatccgataagggaaacgaaatatggcagtatctaatggtacagtttgtcccgataactgttccgtaaccggaaagtcattataaggaattcctttctcaggcgcagaggcacatgccgagacaagaagcactattagcaatatgttagtacaagtcttcaaggctatagccctccattacatactttactttcctaaatgtatgaggacaatctactgtaccggaacccaagcaattcacaggaccctctatttctccatacgccaacgcctctacattttccagcaatagcatatttgtactatatcggtcttcacgagcacaaaaagttactataacgattgttacaacaatcaaactaaaaataagaatactttttctcatagtattattcatttatatatttcatatctcaaaaaatacgttggcaaaattaacggacagtcatttacaaacctaattttccatcggacatcatcggacaaaaggatatttctgagatttatccgccattatccgtacgtctattcattatcattatcaggggcacgctcgatgaaatggcccattttaagctgatatgcataactgacattctcaatagctatatttgatatttcagaaagagatagacgcaaacgtcccactgttttatgaattcgcccattcgtacctgtgccattccaaagtattttatcaatttcagacaacgtaagtttatgttcctctgcgtccaagaaagctttcatcagaatagaatgaagttttgtcagaatgacctcttcgcttccatttctgaagatatgggtattagcatcatagaaacaattactccctaactggtaaatacattctttctctttctccaccgggataacaggcatcggaaccagaatctctttttctactattttctttctaatgaaacaaccactcaaaacggtttttatcttttcgcaaaaagtgtatgacaagattataatagataaaaataagacaaaggcactacaccagaattttcctaatatacgccaccagccacattgtacaaaccctgtcacctcggcttcacatctataacctatataataagatatcaagctatctgacaaagtgaaagaagaataattctgcgaactggcaacagagactttttcctccaaatcagcgatagaaatacgtactgccgtattttccaaattgccagacttcttcattaattcgctccaacgcatattcaaagagtctgcaatcaaaggagattcttctataattaaactacatagcatccggttggcagtctcctttactatactatgattatatttgtatagcggaataagatattctcttcttcctttatctccagttacggccactctttccggaactttcttttcagaagaagggatttccgtagttccgtaaaattcgacttcaatccctcccctttcatgtagttcttcctcaataacatcactgaatgcctttcgtacctgatcattccaattacgaaaccgatactgatacacagcccagatggcccaacaggttaagatcaatacaacaaccaatatcaagcgttttatcacatttttattacccataatccactctattttacatttccataagactactaccaaaacacctgttccccatccacatactcaaagatccgttcatccaccccacccgaatgattcttcagataaagtaacgcccctttaggaacattataaaccagtgaatcggaattagccaccgtagttcccgcagaaatccagcctccctttccggcatagaaaagttcgtacttatcgccttggcgaataaaattaacgcgatttcgcggagtaaagactatcttaccaaccgaaacaggttttcccaaatcaattcctgcccaaccgccatccggctggttataatcaaaagaagtgtatgggtcaccatcaaaggcactcatataccaatgccccttatcgcccccgaaacttcccggtgtacctatcacccttccttgcaacggaaccatatcattcggatccctgtaaaacccgacttccgaaacgttgcagtagctacccgcaggtccgtagtagcgcaaatagcgatattctttcggattactgacataaaccacattctgaagccgtacgggtttctcttcaatcacaaacaaagtatctcttgtccggaatcccgcatcattgctgccttcgaataccccgcccaccatacggtcgatgaatggttcaataaacaggttgaacttatgaagaatcgtaacccgttcctccccctctccgttaccgaaatatcggaaataactcaattccttatgagcccaaaaaggaacagtcatgggcaccaactgcttatcacggtaagaggacagacaaaaaacagcgtttccatcgacattttcaaaacttacctgtccattcctatacttactgacggctaccggaacccactccatgtgtgaaggaagacataaatagataagctcatcccgctccggccggataagaaagcgtgactcagggatgcagatcgtctgttcgcaatcagaataaatatctgtcacgtccagcatcaacggatagcggaaagtaggatgtattttctccggcggttggctcatcattttcatcatgtcccggttgatactgaacatccggcgataaacctttccccggggtgcgtcgtaagtgtgcgattggataagaggaccgggatagagaagcgagcaaaagaaagcgccgcaatgatcatccggtacgaagttccagtaatggggcacattgttatcgccacgcatcagcatttcatcacaaccactcggaatgcccagagagcgacagatgtaagtaaacgcatccgccaaatcttcacagttaccggacagccagtccgcaatttccggccctgcgctatgtttggcataagaataagaaacaaaacggggagaacgtttcttcaaagaatccagcagtacattcgccacaatccaggggaaaacactctcgggtttaagacaaatgctgtccaacagagaattatatttatcgtaaagccgttcgcgccattccaccggacattcatcccctacgcgataaggaagcacgtattcacaaaaattctcaaaagaaaccttcttgccccaaggctgttcacgccagactctgaatgcccagtctatattgtgaaccaaataggcggaatccacctcccgaatatcatacttcaactctgtcctaccgaactgttcgctcattctcccacggttcagggaatccgcaatcacttcgggcgacaaggccgtttcatgaagcatcttgaaaaattgtttttcataattcacctcttcgcccgtatagtagtaatgatagggcatattctcgatcaggaaacaggcggccttatacttcagcgaatccacagcatagtgatttaacaccttttccaactccgcacgattatcacctgcctgtatcagtgccgtctctaaattcgtcttgccgccacaagccattactgcgatggaaagggctattattgaaagaatcttcttcattgtcatcttcttttttgtgtttttattctcattaccgaataagagaaaggaaggaattcgtaatcaaacagctctccaaactcccgaaattcactctcacgcggataaatacgtttaggctcctctgccgtattctcgtccatgccggtagcggccgccaatgtaagcacatgtcctttcgcctcaacccgtgtgcctcccgcaagatggaaccttactttataaggagcatttgccgcattaaccacctttaccactgtctctcccgcctcttcatcgtatccggcagcataaaactgtcggggcatgaccggcttataaccgaccaccaatctcccattcacataaaactccacactctcggacgtactcaccaatttcacatcataccaacgactattcttcagatgccaaggcaatatcttggtcactacctcacccttcatatcttcgatattaatgaagcggttaccccatcttcccacattgacacaatatccctttttcccgttcgccgatacaccataatagagaaaaaagccctcattgccttttgtgcgccgtgccttgaacgtaagtacatattcattcccgatgaaatcgggcaaaacggatctggtacgcagttgtctggaagtttgcatcaatatgccatcctgcactttccactccccgctatcggctcggcaacaggacacatcataatgaatgttttttccatccgcctctatccgaatatctttaaactctacctccgtatcccatgaaccaaatcctatcatgcctttttccattctgacaggtgctggagcactttgcgttttattgatttctacgatgtaggtcggggtattctctatagacatggctcgtgcatagtcggcgctgagtctactctcattatcatcctttacaattaatgagtcgaagtctatgcgaaccagatccccgttccgctccatccccatgtgccaagctacttcggccagcgtagccagcatattaccgctatcggcttcacacacatatccatgcgcatggagcagaaatttcccgcgtggttctttgtcaaatatcgcagaattagcaaagaagaactccggacttctacgataacaggtgtcaatcacattctcaacaggaatcgtttctatagacatattctgataaatatttatataaacttcatcatcaacaggaggcggacaacaagaactgagcaggatagctgataaaataaaagtattccatacatgactgtgcatttttcctaatagtatcataatattggttttaaaggttttgccatttccagccacaaagtaagctatttttatccacctcttaggtatacaatcaaaccaataaggggataaaaaagtgtcttacctgcacaaatcatgctccttcttctctcattaataccaataaacctccccattctcatatacaaaaggacgtacatgtttccgctccttttgagaagaaggtctgatcaaccacaatgcatttttaggaacacctgtaaaatgcagaggcttccctcctttaccactcgtaataacctgccaaccattctgccatatgcaaagttcataaatttcatcttccttatactccacatccagataagggcaaaaactcacctcagacaacaggcagcattcccctaaatccaaatctacataatctgtatcaagcggcctcctataacctgtggaagaccatacatcaaatatattatcagctggttcccctttgaaagacaaaggcaatgatgtcatccaacgaacactcttcacaagctccttgcctgaaaaagtttctttatagaatttcaaatcgcctagcgccattcctttggtaggcaacatcatccgtacataacgtaccgaatctttggattgcacttgcagtcgttggctattcaattctatttgttccggaaatacacacaaagtatctccccatctaccataaaccttccctcccttcagtactgttccggttatgatcccattattatacctgttcaatggataagccagtactcctgtatactgtgtagtcaccatttcttcccgtgtatcctccggataaagtattcgcacctttccatctttctgtaccaatacggggtcagccgccactaccatctctccgtccatacagtacatgggcaaataaacaatgtctttccccattcccgaaaacaacgccacatccccggttatttttccccaatgaacaggtttccagttattataattccatacgcacagatacgcatacttcgtgccggaaggcatcttacgcagctttatcctcacattcaccgtatcaaaatactcatgcgaaacatctttcttccttaaacttctgaaggcttcaggtatatccttagcaggcactccatctgccagcggcccttccatataatatcggtatgtcttcctgaaaaccttaggcagacggaagcgtccccagtatttatgataatccatattgctgtaaaggcgcttatactgccacaagtcctgttcccaaaagggattaaaaggatgaatatctccctcttcaatcaatacactccacgaatgagaacttcccctattggcccatgcaggaacgatgtcagtggcagccgctatacctaaagaagaaaacaacaatgcgttatgccaacatttgtgcgtacaaagcccgtgacgtaacttctctaaggtagcaacatcccatataggaataccggtagcatgaaatcccgaatgccctatgtaactatacaatcgtaacagagaatccgcttcttctatcatattttttccgggattggcaaaaaactgtccgtgatgcctactgtagaatacctggcgtgcactatccaccaacaaaccgttttcctggcgataaggcagaatgtaatcacaaaaagtttcaaaagaatagtttcgggtatagacattctctttccatacccgaaacgcctgctcaatttccgttattaaccgggaagctttaatggtcttaatatcaatacacatatcctttttcagcttttcattattatagctggaatatgcattccacaagctgtctatctgccttccccagtctttacccctgggatactggtcgtatatagacagagaatcataatcgtaggtatgcgacaatgaatcatacatttggtagaaaggctggcaagctgccacaattttttcgtccacggcaaaagctcccggcatattctctataagaaaacaagccgctttatacttcaaactatctcccctgaagtaatccaaaaccaattctaactctttccggttatccccggaagctgctaatgcgcgttctaacgaactttcttgccgacatgcgacgagaaaaatcaataccagatataaggtaaacctcaagttgctcattacttttttaatatctatgttttattaaagagttctattgagacctttcacgaaaggcatagtgttttatttcataaacataaaccataataattacaaatataataaataatattattatatattcaataaattataaatgtatgattaaaaattcagattacacatttaataaattcatattacaagcaatagattttaaatacaacatcaatattttacgaattcacatttgaaaattaactaaccggaattatcttataacaagagtgtttcattgcaatacaaaccctatctaaaccatatccgggatgcacttgctccgtaccaaggccgtactttctccggtcagaggtacctgtgagtggagatggtacggagcaagtgcattccgggtgtaacggagacaggtcataatacaataaagaagatcaaagagttatctacgcaaaatgacgcaaatgaacgcaaaaatcacagggagcgggttgaagagatttattttccatatatttgcgcagtgacagaaacaagtaattaaaaacacgatatcatgggaatcatcaaccagggcattctcggaggtttctccggtaaagtgggaccgatagtagggctccgctggaaatcaaactactatatacgcgcacgggccgccaaagtcagcaatccgcgttcaactccgctatgtcctacacactgaaaagagccgtgactggcagtggaaaagaaatcaaaatagattttgaccgggcattggtttctatgggaaccctgatgccggtattcgaaggtacagccacacaagacggaaataagatgcactttaactggcaggacaacagtggcacgggaaatgcagaagatacggacatagccatgttattaatatataacaaagacaaagaaacagctgtttacgatacggaagccaccctacgttccgcccgacatgcagaacttcaacttccttccgactggcaggacgatgaattgatagcctacctcagttttcgcagcgccgacgggagttgcgtggccaatagcattcgcctgacggtaacagtagaccaaacagacttacctgcaccggaccaggaggtttccgccttatgtacttcatcagatcggattccgctttatccaaaacctaaacagccggtcattaataacgtatccgtcaaggatcttacctactatacccttaccggaaagccttttcagggcagactgtacagaactgggtgatttcagatgatatcttcgcacaaactcaccggaagtcacattgacagcaactttttcggcagctatcgcacggagtatctcacgctggcgctccgttaaatccgcaaagatggactgatagataggtacctatgataaagggattcacttgtatactcttcatgattatcctgctttaaattattgcaaattataataattatattcataataatcattctaacttgctacgaaacttttggaaatgcggaaagttattgctacatataaacatctgcttatgaacaaaataactaatccatttttgatttatggctacgccgggccagattatttttgtgctcggaaagaggatacacaaaatccattaagtaaacgacaatcagcgataaattaacgtcgacagataatcttctgcaaacatctcattcgccacttccagcaaaatctccggagtaatttgttcaatacgttgataaaccgcttcggaactttcatacttattatagtgcaggaaagtcttcgccatgccgagagcattgttctcattattatccgaagccacacctatttgtccgatgagttgcttcttcgcagctgcgagttgtagcgaagtcatctttgtatcacgcagatttttaagttctttcatcaccagacgcatacaagtatccacatcatcaggatcgcaaccaaaataagtgcagaaaaccccggtatccgtataagaagtcaggttagactctacattatagacaaggccgcgacgctcacgcagagaaacattcaagcgactgttcataccgggcccgccaagaatattattcaatagatagagcgcggtacgcttatcatcgtacgcattatagccacggctgcctatcatcacatgagcctgatgcgtatccttatgcaccaccagtttttcgggcgtataaagagacggcggagtacgacggttatccaccgtcaccgctggaacatcggcaagcagcttctctgccaaacggatgatttgcttgaaatacaggtttccccacacaaagaacaccatattccccggatgatagaaacgggaagtaaacgcagcggcatcttcgctgtgaaaggtcttcagcagctcaggattccccaggatattgcgtcccaacggatgtcctcggaagattaaatcctcaaaatcatcgaaaataagttcggaaggggtgtcttcataagattggatctcatcaataatcacttccgtttccttttcaatctcacgttgcggaaaagtagagtgaaagacaatatccgccagtaactcgaacgcacggccgaaatgttcggtaagaaaagcagagtagatcactgtttcctccttgttggtataagcattcaggtcaccgcccacattctccatacggttgagtatatgccaggctttccgcttctgagtacccttaaaaataagatgttccacaaaatgcgccatgccctgttcattctccagttcatcacgggttccggcatcaactgcaaaaccacagtaagccacatcggaaaatgacggctggtgaataatacgcaaaccattggcaagagtatattgatggtgtcccaacaagggtaatagtgctaacttcttcattctgacgtttgaaactaattgagggcgcaaagatagcgcaatttgacgaggtccccttatcttcgcaaagcaaaaatacaataaaacttattgccatttatggaaaattgcagatatttgtaggctataacctaactactaacaaaaatagtataatgattgaatccattcaagagcttttgcagaaagaggcacaagccgtactgaacatccccgtgacagacgcttacgagcgtgcggtagaacttatcgtggaacagattcaccggcggaaagggaaactggtgacctcaggtatgggaaaagccggacagattgccatgaacattgctacgacattctgttccacaggtattccttccgtatttctgcaccccagcgaagcgcaacacggagacttgggcatcttgcaggagaacgacctgctgttgctgatttccaattccggtaagacgcgtgaaatcgttgaacttacacaattggctcataatctgaacccagacctcaagtttattgttattaccggaaatccggatagtccgttggcacacgagtccgatgtatgcctcagcacaggaaaaccaaaggaagtttgtgctttaggtatgactcccaccacttcgaccactgtgatgaccgttatcggcgacatccttgtggtacaagtcatgaaacagacaggatttactattggagactactccaaacgccatcacggtggctatttgggtgaaaaatcaagaaaattatgcgaaaagtaattggtataggagaaacgattcttgacatcattttccgcaacggccagccgacagctgccgtaccgggcggttcagtattcaatggcgtcgtgtcattggcacgggcaggcgttcccgtcagctttatcagtgagacaggaaacgaccgggtaggtaatacaatcctgcaatccatgcgggatagcggcatgtctactgactatgtcaacgtatttcccgatggaaaatccccggtatcactggcctatcttaacgagaatggtgatgcggaatacatcttctacaaagattatcccaagcaacggctggacgtggttttcccaaaactggaagaagacgacatcgtggttttcggctcctattttgccctgaatccggtgctgcgcgaaaaggttctggatttgctggaacaggcacgcgagaagaaagcaatcgtgtactatgaccccaacttccggtcgtcgcacaaaagcgaggctatcaagctgacgtccaccatcatcgaaaatttggaatatgccgacattgtgcgcggatctatagaagactttttctatatgtacaatcaaagagaagtggacaaggtatataaagacaaaattcgtttttattgccctaacttcctttgtactgccggagccaaagaaatctcactacgcacgaatagcatcaccaaagagtatcctattcccccattggaagcagtcagtactattggcgcaggcgataactttaatgccggtattatttatggcttattgaagtacgacgtgcgttactgcgatttaggacagataagcgaggacacctgggacaagattatccgttgcggcatcgagtttgcggcagatgtatgccggagtttcaacaactctatatcaccggaatttgccaagcagttgcctcccgttaactaaatccccgttaaaggagaaaaaactctgtgaaactctgtgctctggaataacaaaagtcatcagaatacatatctttgcaacaaagcgaagataagctgcacctcggcataagaaatgaacaagctcattttattctgctctcggtttgcattatctttgcatatatatgctcagacaaaaaaactatgtatagaaatctgttgaacttgctaacatgtgtattgctgctaccggcttgtagcggcacagctcctcatatttccgttgtttgcgaagaaaataacgtcgggaacagtatcgtcaaatgggaaatagcccctctcatcaaagggaacgtaaaggtatatgcttcgactgatccgaacaatatccccgaggattctccggtagccatagcaaacatttccgatcagcgaatgacgattgtcaccacagaccctaccaagcgttattactacaccctcgtattcaatgataaatatcgcgtaaagattgctacccgcaatgtcaatatccccggcatacaaaacttccgtgatatgggtgggtatccgtcataccctaccaaaaagagagtgcgttggggcatgctctatcgttctgcacagatagacagtctggaatgctactcacgcagggaactgaagaatataggcatcaagaccatcatcgatctgcgctcagaatcggaattaaaaggtcacaccccactgcaacaaggatttaatgtaatacatgtccctataaaaacgggagatatggaagatatcctgaaaggaattcaggaacagaaaataaaaagcgacaccgtctaccggatggtagaacggatgaaccgcgaattggtaatgaactatcataaagagtatcgccagatatttgatatcttgctgaacagtaccaattaccctgtcgttatccattgctcctccggcaaaggacgcaccggcatcgcttcggcactgatcctcgcctccctcggcgtgaacagcgacatcattatggaagactaccgcctaagcaacgattacttcaacattcccagcgcttccagttatgcctacaacctgcccgcacgctcgcaagaggccattacgaccatctattcggcaagggaagatttcctgaacgccgccaaggaggaaatagagcgtcggtacggtgatgtagacacgtatctgcaaagagctatcggactcaccaaagaagaaataaagaagctgcaaagcattctgctggtgaaaaacgattagtaataaaaaaatagccctgttattcaattttatcgctgataactaatcactaatcactaaatttgttctatctttgtgcccgaatataaagatatacaaagatttaatgaagaattttgaagagctcggtctgtcgccggagatacgccgcgccattgaagaaatgggatatgagtgtcccatgccggtacaagaggaagtgattccttaccttttaggagaaaataatgatgttgtagcacttgcacaaacaggaacggggaaaaccgccgcattcggcttaccacttatccagaaaattaatgtaaagaaccggattccacaatcccttatactttgccctacacgcgaactttgcttgcagattgcaggtgatctgaatgattattccaaatacatcaccggattgagggtattgcctgtatatggtggttcatccatagacagccagatacgcgccctgaaacagggtgtacatatcattgtcgccaccccgggacgcttgctcgacctgatggagcgcaaaacggtatccctcaccaccatccagaacgtagtgatggacgaggcggacgaaatgctgaacatgggattcacggacagcatcaacgccattcttgccgatgtaccgcaagagcgtaacaccctgttattctccgccactatgagcccggagattgcacgcatttcaaagaagtatctgcgtgacgccaaagaaatcaccatcggacggaaaaatgaaagcacaagcaatgtgaagcatgtggttttcaccgttcatgccaaagataaatacgctgccctgaaacgcatcgtagactattacccgcaaatatatggtatcattttctgccgtacacgaaaagaaacgcaggagattgccgacaagctgatgcaggacggctataacgctgactcattgcatggagaattaagccaggcacaacgtgataccgtcatgcagaaattccgtatccgcaatctgcaaatcctggttgccacggacgttgccgcccgcggactggatgtggacgatctgacccacgtcatcaattatggcttgccggatgataccgaaagctacactcaccgtagcggacgtacaggacgtgccggaaagacgggtacttccatcgccatcatcaacctgcgcgagaaaggtaaaatgcgtgaaatcgaacggattatcagcaagaagtttattgttggtgaaatgcctaccggtaaacagatttgcgagaaacagctgctgaaagtaatcgatgacctggaaaaggtgaaggtgaatgaggaagatatggctgatttcatgcctgaaatataccgtaaactggactggttgagcaaagaagacctgatcaagcgtatggtttctcatgaatttaaccgcttctcagaatattaccgcaatcgcgaagaaatagaaatgcctaccgacagccgtggcgaacgcaacagcagaggcggcagcgaacgcaccggtgatcgcaacagccgcaaagcagatccgggattcacccgactgttcatcaatctgggtaagatggataacttcttcccaaatgagctgataggcctactgaacggtaatacccgcggacgcgtggaactgggacgcattgacctgatgaagaacttctcattcttcgaagtagatgagaaagaggcaggtaatgtagtgaaagccctgaaccgtgcgaactggaacggccgaaaggtatctgtagaaattgccggcgaagaaggcaaggaagctcccaaaggcagacgtaagagtgagggcaacaactacggcaagaaggaatttgaaggcaagaaacgcagcttcaaagacgaaaagcgtagtgatgcatctggaaaacgtagcgatgcccccagaaaaagtagaagtaaatctgaaagtgctccggctgacaaaaagaaaagcaaaccaagccgcgaagagcgtggctataccgacgcccgcggcaagaaagacgattggagacagttctttcaaggcgacaacaaggagttccgtgataaagagcccgatttcagcgaagaaggctgggcaagacgggcacctaagaagaaatgattaatagtgattagtggttagtgatgagtgattagtgcaactgctaattactcatcactaaccactaatcacttattaacgtgaacaaagtaaacggattcttatatggccttctctcttcggcaagcttcggacttattccgctgttcaccattcctgccatgcatcagggcatgcagttctggtctatactgctctaccgtttcctctttgccatgctggcactggcctgtatactgttgctcgacaagcagtctttccgcatccgccggaaagagatacttccacttctcctgctgtcattcctgtatgactgttccgctgtttttctgttctggggatataagttcatgtcaagcggagtagctactaccattcatttcatgtatccggtgctgactacgcttattatgatgattttcttccgcgaaaagaaatccccttggcgtatagcagcaatcgctttagcggtaagcggagttttcttcctttcgcatggagatacgacagggactgttactttactgggtatttttatcgttctgctctctgctttgggctacgcgctctatctggtcaccgtcagtcaactgaaatcccttgaaatgaaggggctgaaaatgacattctatgttttcctttttggcggaatccttcttttcaccggaatgacagtgacaggagtcggagtacaggccatcccggaccggataaccctgggaaacctggtgatgctggcattggtaccgaccgtaatatctaatctggcactggtacgcgccattaaaaacataggctccacactcacctctgtattgggagccatggagcctgtgactgccgtctgtgtaggcattctcatctttggagaacctttcactcaaagcatcgccttaggcatcggattgattatttcggcagttacggtgatcatactgaaaaaatagaatgtcctattttcagcctgctctttttagtatctatatatagacacaagatttcatctaccttcacaggcagatgaaatccctgaacatccaattcaacgttcttatctatttttgaatttaatatattaataccccggattctggtaataaccaccaccctcttccagattctccaggaatgactgcgggaatggtcttacctcatgtttgccatctacaaagtattgaccgacatcaggatttgtagacttcagataggtgctggtcaacttccctgtacgcttcaaatcatagaaccgtacatactccccacacaattctctggcacgttcatccaatactgtttctactgttgccgcaccggacagagccttggcaccggcacgctcacgaacctgatttatgtattgcatcgcatttgctccgccatttacatagatatcggcctcagcagctattaagaaaacctcaggagtacgcatcataaaggtagcattcagatttccgagacgtttcttgctcaagttattaacgtaataattgctgctgttatgcttcatcaacgacggatagaaattaagccagggactgaccaccaccgcattatcataatctctgtgataattcataatcaccgtgtcggcctcagcatataaatccttgtaatcaacatacaggatttttgaattcttcttttccgctactttttccgcatatccttcatctcccggacgaataaattccagtgctttttcatcaaacacaaatttggtatatttccgttccatctcaccggtagttgcattgggttccatgaatgatatttccggagaatccaggttcttgtcgaatgtcttcacttgtgattcactccatccttggcctttgtctttgttacaagtccaggaagtctggaagaatgcatgatatctggggtctaacgtaccgtcctcctgctcatacagatccaacagatgttttgaaggcataaagcttccgccggcacgtctaccccatatctgataatcggacaagccttcatatttgttgcctgaatgtatatcagtcttgagcacaatggccgcaaaggctgtgagcggacaatagaactgttcgtcattctggttcatgatccaagcctgattgctcacacctcccaccacgtaacgatgcttccacaaagcctccttattctcaaaattgttactttcatcaaaaacctcttccaaggtaggatacataaagactcccagggccgctcctccggctttgcagtcttctatcatttccttggctacatccaaagcccgttgcgcatacttcttggaggaatcgtatcggacagattgcaagcaagctctcgccagcatgcccattgccgattttttagaaggacgggtagttctttcttctaccggcaaccactgtacggcaaattccagatcgggaatgatgcactgctcatagatatcaagtggagtatctttgccgggacacaaatccacactttccacaggggtcatctgcaatttcacaccgcccagctgctctaccaggttataatagtacactgctctcataaagtgagcctcggccaccttcgcgttcttttcttcatcactggcgaaaggtactttaccagccttcacaattgcctgattgcaataacaaatgccgtcgtaacaacaattcagcgtgttggccatcatattgttggcaaagtcagaccccataccatatttcaggtaaaggttgttgccattcttctgcgaagtccagatgtccgttccgccttcggtaagttgcatgaacagcccaaagccgtacatggatcgttccataccgaaataaacattattaagtatggtttgatagccttctaccgaagcggacaaggcatccatggtgtatcccgaaggattgtattcatcgagtgagcaggaagcgttgcttaatgtcactgccatcactattacagtcagccagttttttattttcgtaatcatatctattcttattgaatttattaattaaaaggatacattaagtcccaagagataagtcttgtagagagggaaggaatcagaaccattattttcggggtctgtatgcttcaactcgctctgaaagggcagtacaaatacattatatgctgttgcgtaaaggcggcacttctcaagtcccagtgttttgcacaacttcttgggaaaggtatatcccagggtgatattctttatcttggcgtatgaaccgtcaaggtacctcaacgaagcgatacccgtagtactggcaatacccggacgggggaagtaggcgtcttggttttcgggagtccagtacttcgtacccttaggctggttattgttattggctgagtaccatccgattgccttactgtctatcatctgcccgtatcttatcatggcgaaaacgcttaaatcaaaatctctgtacttaaaagtattgtttatacccagaattccgtcaggcacattagaacccaatatctggagatcgcgcgtattactataaatatgcacaccaccgtctccgaccatgtttccattctcatcttcagtgaactgttccacagtatgaagctttatgtagcccggctggcatccatactttgcggcttcttcttcttcatcggtactccatattccggcatacttaaaatcataaaaagttttaatgggatgtccttcgaacaacttcttggcaatcaggtcaccgtcgggcaagtctacaatcttttcatcgttatgagtataagatatggatgaagtccatttgaaattccggctctctatattgactgtggataattgaatttcataacccttgttgctggtttcaccaatattctgccaagtgttcataggcgatccccaagctgtgatggcggaagtgataggcaatgtgcggctaaataaaagatctttcgtactggaatcatagtagtcgaagctcaagctgatgcgattgtcgaagaatcccaaatccacaccatagttccactgataagtcttctcccatccgatagaggggtttccgtatggagagaccatttggcttacggaactcagcacaccgtcgatggatacgggagaataagtggcggctcctgtttgtgaagaataggcgcccatacctcctgagttaccggtaacaccataactcaagcggagtttcatgttgttcagccagtttcgggtagctttcatgaaaggctcctgtgaaacacgccacgccaaggctccggcaggaaacgattcccatttatatccttctgccagatgagacgcgccatcccaacgggtagtgaacgaagcgatgtacttatccttgtatatatagttaagacggaaagcataagacatcttttggttctgtgaataatgagactgcacaccgaacttcgtgatgcccgaagccatattgtggaacaagtacgaatcgagaggctggcccgaagcccgcatgttgttattatcactctggccatggctataagaggtgattccggtcagcgtcactttatgtcctttaagcggctcaaacttataagtcagcacattgtcccacagataactgtagccataactgttgttgatgtacgcatagggtgccgaatatccgttttcaactccctgcaatgaatgcgtaccgatatatcgtccgttgcgtgagttattcaatgtggtgctgatttgtgagcggaatgaaagtcccttcagcggcgtaaactccagatacccgttgatattagcataagttgtacgcgtttcatcggcatactggttctccatttcatctccaaacggggatgtttgtccatcaataaattcaacattgacgttgcccttgtcatcgtatggttgccccaacgggaaggcggtcaatgctttcgtaaagatattcttgccccgtgagtttttgattgtataggtaagcgccgagcttgtgccaatcttcacccatttacgaagttgatagtctacgttgaacctcatgccatagcgcgtctgattttcgttggaaagcaagccttgcgtattgttataactgaaggaggtgtataccttgattttatcacttccacctttcaatgacaagtttatatctttctgagaagcgtttccttgggtggcctcatcaatccagtctatccattgattattttcataagcttgctgtatagcttcagaagaatacatctggaagaaatcttccggatagtctccattccgggtgcgataatactcactctgataacggtaccactcatcgcccgtcataccatgtataaagttggctccacccgagatgctgtatttggcatccaagtttactgtaatctttcctgcgtcgcctcttttggtagtgatgataataacgccattggcacccgccgaaccgtaaatagcagttgacgacgcatctttcaatacatcaatctgctcaatatcatttggattgagttggttgtagctggctccctgcacaccgtcaatgataaacagcggactgttactaccgttgatagaacgggaaccacgcaacaggatatccacatcctctcccacggcaccggatcccatcataatatccgcacccgcaattttaccttgaagggcctccattacattgcttgtcggagtaccctttatgtcttccttacttaccgacacgacagaaccactcagatcggcttttctctgcgtaccataaccagtgctcacaaccacctcctccagcaaattcgcatcctcttgcatcacaatgttcaaagaagttctccctttcaggtttatcacctgtttcacatatcccatataagatacttcaattggatacttgcccgaggctttcaaagtgaactgaccgtcaagattggtaaccactccattacttgtccctttttctactacggaagccccgattatgggctctccctggctgtcctttacagttcccgtaatgttctgcgcaacggcattgacactcaggaaaacgaatagcatactaagcaatactcgcatgtttttcagattaatagatgttttcatcaattttaaattaattaataattaaaggttatttgtcacaaaattacctaacgaatgttttttaactttgtatgagcgtacaagaattgtgtctgtccgtctattacacagctatgaacctgttatttcgattaaaaaaccaattaataccaaaatgaaactacacctgtcgacactattgcttttattctgccttccgatactcggacagccccaacatacaattacccgatacaacattgaagatggacttccacaacaaaccataaccggcatcacccgagatagaaacggatatatgtggttcaccacctggaatgggctgtgccgttttaacggacattcattcgtgacttacagagtgatgcccggtgatgcgaatgacctggcgaccaaccggatagacgacataaagatagacgcacgcaatcacctttggctattggatgacgaaagtaccctttaccgatttcatccggaaagtaacaagttcgaccgtcttacatcgcaaacggctcccgcccaaaatatattcactctttccgatggggatacctgggtattccaaacagatgggcgtttgctgaggattactccggatgagtcaacgatggcttgccggcaaattctggacagctcgtatggagtacgcagaatcataagcctcctgcaggataaagaaatcatttggatcatctctgacagaggtatttataaatactccaagaaagataataaactgaccctggccttatccacacaaaaatatttccatagcttcaggaaatacgcaaacaagttcgtagtcggttccgacaatggtcaactatatgtttacgacccaaagaaagatgattattcaatagtgaagttcaacacttccgccacactgacaagaatcaaagcctatgattccagacatttacttatcacagcagaaaatgacggcttcttcctgacaaacggttatcagggagagggaacacactatacggcttcaaaccaactgttaagcaatgaagtgaatgcactgtacgtagaagatagccagaaacatatatggattgcctacaaaaacacaacaatgatttcccgtatcgactcactcggcaattaccgcaagcattaccaactaaaaatgcagaagcatgacaattcccaacggcaaatatcacaagaccatgacgggcggttatgggtattctctaagaacgaagcccttaattattatgataaaaatgcagatgaattcctcttcttttccatcagcaggaccaattgtgaatcagcccctcctaaaataaagaagatatactttgacaagcagaacaatctatggatagccaaacagcctaaaggacttgtaaaagtatctttcaaaaaagatcttttcagtctctccgtaccggacatagcagaatatccatcttccaacgaattgagaagtataatggaagatgcagaccacaatatctgggttggaagcaaaaacggagacatacaggtatatgacagcaacaagcgtttcatcggcttcctaaactccaccggcaggttatcccggcaagtggagaatttcgatgccgtatatgccttgctacaagatcagaagggaaatatatggatagggacacgcaataaaggccttatcaaactaatccccaacggcaaactgaattaccagctcaaatactataagaatgatcctgcggacaagttcagtctgagttgcaattccatattttcactaaaagaggataaacagggcagaatctggatcggcacattaggaggcggagtcaactatacagaccgagacgggcacttcatacatccgggcaatgaactatcggattatccaacccgctttttaagaatcaagaacatctgtatagatcaccagagcaacatctggctggctacaacatcgggagtattgctctgcaaatggagtaacggaaaactggcatacactcccattgtgcgcaattgcaacgaaaagaacagcttgagttgcgacaatgtatatgacgtgtttgaaagcagcaaacacgaaatctttatcactacctttggtggcgggctcgacaagttgaccggattcgataagcaaaacaatggaatcttcaagaactattcttctccacaaatgatttccaacgtcccgctgacactggcggaagataacaaaggcaatctatggatcccatcagaaaatggcctgtaccggttgtttacggacagtgactcgaccgaagtatatgacaaccgattcctgcccgaagggcttctgctcaccgaaagcagagcctgccgcctatcaagcgatgaaatgctttttggaacggacaagggattattatcaatgaaacccgaaagaatgaagcgagactcgcatgcatccaaccttatcattacagatatccacataaacggagaaaaaaaggaaccctcctaccggtcttccggcataaccctcagccacaaggagaactcattcagcatcaattatgagacgctggacatgaaattccccaataagatagagtacgcttaccgtctgaaaggctttgacaactggaactatgtgaaaaacaaccgcatggcagtctatacaaacattcctaaagggaactacagcttccaggttaaatcaaccaacagtgacggagtatggagtaataagataaaggagatttccatcaccatattgccttcattctgggaatccatttacggtaccatattgtatttcattatatttatcctcattgttgccatttcaacctatattctgtttgttatctataagctcaggaaccgggtcgcaatagagaagcatatcttagatataaaaaccaaattcttcacagatatgattcatgaactacgtactcctttcacactgatcgtagcccccatagaccacatgctctcacaaaaggacttgagtcctgtcattcagcaagacctagctctggtaaaacgaaacaccaaacatacactgaaaatcatcaatcaggtactcgatttgcagaagatacagaatgaatccaaacttacagtacaaagaatagaaatagccccattcatcgaacatattataaataatttccagtcaattgccatccaacgggaaagtgaaatcacctttgaatctaaagaatcacctctatttttatgggcagatccggataaattggaaagcattctcttcaacctgatcacgaatgcttttaaatattcacccaaaggaacagtcatacatctgtctgttcaggaaactgataccaatatcattctgcaaatatccgaccagggatatggcatcagtcaggaaaaacaaaaaagtatctttaaccggttcgagaattacgtgagttccgacatcttcaagaaacaaagtacaggcatagggttgtctttagtaaaggaactggtagagttacacaaaggcaaaatcactttacagagcaaaataaacgagggttccactttcaccatctacttccgtaaaggaaaagagcattttgcacctgaaacggagttcattctatcagattatgatgaacggcctcaactgtcccaaaatgatactctttttctgagagacaattacgaagcagaagaagaggcttgtaaggactgcggtaagagttccattttagtggtggatgataatcaggagcttcttttcttcttacatacgattctttccgaagagtttcgtgtgatcacggcctccaatggaaaagagggattggaaaaggcaatcaagtacctgccgaatatgattgtcagcgatgttgtaatgccggaaatgacagggatcgaaatggccaagaagctacaagccaatacttatacctgccacataccgattattttactgagtagtaaggcagatgtggaaaatcaaaatgaaggtttggaattgggcgtggatgattacataaccaagcccttcagtgcgagttatctgatagccaagatatggaatatcatcagacaaagaaagcggattcaggcactgtattattcggaactcatacaaaataaaggagaaagcaacatcgattccgaagagaaagaagaacttcgctcacttccgcaagccgataaagacttgttggatgggattgtctgtttcatcaacaaacatctggatcatccggacttgagcgtagacacgcttgttgaagaagcaggaatcagccgctccgctctattcaaaaagataaagacactcataggtatctcaccgatggagctcatcaaaaacatacgtttgaagaaagcggcggaactgatcagagaggggtcggacaacttcacccagatagcatacaagaccggatttaaggactcacagcatttcagtaaatgcttcaagatgatttatggagtaacacctactgaatataaaaagaaatatccgtgatatgtattgaaagatcagagttatcctgccgctcctaaagcgcaaatagaaacaatttcttataaatggaccacagattgctgtttttttcatatttttgtccgagacatcaaggaatcttatccaatatatgaagaaacatcacttttatatcatattcttcctgttgctctgcatcattaacgaaggatattcgcaaggactacaattctatggaaacgaaaaacgaatttccgaacgctcctctttttgtgtgtttaccgaagaatatctttctgtagcaaccggaacatttaccatatcttttgaatatgccgcacaaaatacagaaagtccgggatacatcttttatctcaaaaatgcggacggacaggaagctttcaacctgacttatgtgtacgatgactccaaaggaagtttcatgttcgctcaggatggaaagcaaatttaccacgcgttcccatatcctgccgcaaagttacatgcgaaatggattcccatcatattcaaaatggatattcctaatgaccgtattaatattagtataggtaatgatcaagtaaccattgaggacattgggttgaataaacggacatttacccctcaacttttcttcggtatgtgcaactacattctggaaacagcctctttctccatccgtaacctgaaaataaacaacgatgaagaaaactggaacttccccctcaatgaaagcaaaggggaagatgtgcacgacaacaaaggaagaattatcggacatgtcacaaaccctacctggctcatcaatcgttcgtattattggaaaccgttatttcaatcttactcttccactccatcgggtttcgcctttgcaccggaaaagcaggaattctacatatacaatcaagactctatcattacttacaatatttataagcgcacatcagaacagcttccttatatgcccgaaaagacaacattcccgattcgtctgggtatgaacttttatgatgagagcaaaggaaatatctacgcctacgagttgaactgggcagagacctttatcgcaaagatgaatccgcaaaccagaacgtgggatatgattaatcaaaacgatatcactcttcaaatgcatcatcatagcgcaatttttaatcctcaaaagcgacaattcctcttttttggcgggtatggcaatcgtcgttactacaatactttcataacctatgatttgttacaagaacgctgggatacccttcattttgcaggagataaaatttcacctcgtttttttgcaggtatagcgatgagtcctgattgcaaacacgcttatatctatggaggaaaaggcaatgaaaccggtgatcagaatgtaggcatccagtattattacgatttctatcaattagacttcgagacaaaacaaatcaagaagttgtgggaacacaaggcaccctcagccaatcgtattcctacaagagacatgatactttccgaagatggaaaatacgtctatctgctggcctatccggaatacaaacccgagacccacctgcaactctatcgtctctctatttccgacggtagctatgaagctttaggcgatagtattccactcacctcggaagagatagcaaccaatgccaatttatacttcaataagaaactggaagaattctattgtgtcactcaagagtttgaaaaatacgggcaatccgctacacgtatctactcactctcaaatcctcccgcatcgctggcagccgtaaaattctacgataaacttagaagtgattccaaggactcatctatttggctgtatctcattcctatattgtgccttgtcgtagccggaggcatcctcatcactattaaacgacagcaatccacaaaaaaagaaaaacaccagaccaaaacgatcttctcaccccagaaaagtaatacttccgatacaggactaatatcaataattcccgcagccaccgctgaaaccatcgaaaaagaagaaatagacgaaacacttctaccagatgcaattaccaagcgcagaaacagtatttccctcttcggaacctttacagccacagacaaaaatggacgggatatgacctatatgttcagccccaaaataagacatatattcttatacatactgataaacagtataaccaaagatggagtattatcttccgatatgaataacctgttctggcccgacaagccggatgataaaataaagaacctgaaaaatgtaaccatgaaccacctccgcaaaacattgcaagagctggaaggtattgagcttacccaccaaaaaggttactttaaattaatgttcacagatgagtgttattgtgattatcaacgtttcttcttcttaacggatggtatgaaacgtgctcctctatcagagaatgacacgatggaattacacaacattctcgcacaagggaaattcctgaataccatcgaagagagtttattcgactatttcaaacaacaggcggaatcatttacagtcaacctgctatccgaacaaatacatacattctacaagaatggaagaaactccgctacgatacgtatctgcaatatcctgttcgccatagacccactatccgatatagctatgacttatgctgtatgtacttatcgtcgccagaacaggtcagacaaagctatacatctttacggcattttcacaaaagaataccggaaggtaatggatgaagattacccgatagcctttgataaagtgaatactgaaaacatcagattctaactcaatatgtactgataaaaaatctccttattgaaacattcatttcaataaggagaaattaaatagaaaacaatctttattaccttcttaccatcctatataactgtaccgtgcactatcagttctccaatattagtattatttgatccatcgtgactgcttgttatctcaatcttcaaataacgcccttcggcatcttctgtatcaaactcctgcatatctggcgtcttcttagcttcaaacttaccaatacttttccagctgttctgatcatcactgatgaagaactccatatcttttgtatttgcatcaccaccagactgtctgccataatagtcaacacttactacttcactacgatctttcatatcaataatgataatatgcggccaatcctgccatccaccactccattgcgaatgccagaaagtatttatatcaccgtcaataatcgcctctactctcccattaggagcactttctgccggttcatccgtattggcagtaatagtccatttctttgagtctagtaccggactcgttatgataatctccatagcataaagtccaccgtcctcgcgtaccttatattgttcagaagaaagcctaattggtaataggtaattgccgataggcagtgctgaaacagataatgcaatctttgcagtcgcctctttcatatcctctacaatcgtaaccgatgccggtaaagtataacaagtttcaggcaagagttcaaattgtatagcacttgtagcattataagtagccagataatccgcatcaacttccaaattacatgtaatgttctgtgtattggaagcattaaagccaactgtcagattttgtgtcatattagcagcacccaagcccaagttcaaattaacacccgatgaagtaaaataaatcatcggttcaatcacaacaggagccaaaatagccatagacttatcattggttatatcaacagaagcctccactaacttcatgggcaatacataatccccttctcccaaagcttcgatagcctccggagtaaaaataatatccactacctgatttacatctttacggtcagaactgaacgacacggtagaagaggtaatctgataacaagtttcaggcatcatcttatattcggtttcattccgagtattataagctgctaattcttcagtcgaacatagaccaatagtagccgtacaagccgtctctaccgctcccgatttataaatggccagctgataagtagatggcataccagtcttataaatttcaaactcttgcaatccacttgataccaaataaaccttattttctgtcaggttatcttccaacccatcttgacaggaaaagaaaacactggtacccaacaacaaagctcctaatatcagtttatagtttttcatattatagtatgttctaatattaataaattcaagttacaaccatatcaccaacccggattctgcaccaaagaattgttgcgatctatttcatcctgcgaaatgggatagagatacatcttatcttcaaatacacggcgttcaaaaaccgtacgctgatagaactccgtggattcaaagctatcacctgcaaaaacattcataccatacatatttccattgtcaccatacatgcgacggtcaggagtatgcttagtatccgtcttacctgaaagcaaacgacggcgagtagtaaaataacggtcggcttcaaaacaaagctccacctgacgctcacgtataatatattccgcctgaagctctgtatttccttttatctccgggtgagtatcgaaaatgctgggtaaacctgcacgctcacgaatcttatcccagtatttcttaatatcagagttattgggatcatactcattcaaagcttcaatataattcagataaatgccagcaaggcgaatataagtatgctgacgccatccgtaatattgtccacgataaggattgctatcatagtgtatgaacttattaaccagatatcctgtagctgagtggtcagaaacgccattagctcctgatacaccactaccataaagttccacacgcccccagccatctttattcttctcagaagagtaaatatcacggtcagcagcagccacctgcagaaccggatgtccgttataaagaatacttgcataaaaacgagcctcacggttggcatacatattccattcacctttacgatgtccccatgaattaccatcacgaatctcgttcacattatcatttaaccagttggaatgagcttcatcagcaaaaccttcttctacatatccgccttcctcatcgtcaattgtatatccattagccatgtaaaaggcatcaaccaaacgttgtgtaggtgccatgccgttccaaccgccgggacgagggcaagcatgcttttcaaagccattggcatcacacttggtaaccgcccataatacttcacaattccatttctccaaatgcacattacgcactgatttatatggattgaaagttccatccccattttcatcattacgataaagagcaatccggacttcagaactattttcagccgcagtaatcacggccttagcagctgtagcagcatctttccacttctgttcactataagtagtatttaccaacggggtaccatcattatttttaaaagaagcatatgctttatttccattccattgcgggctggcagccattaaggtcacttccgattttacagccagacaagctaccttatcaggctttcccaaccaagttctatccacctgccaagagaaaggaagatccggataagcctcatccaacatacggataatgtaactgacacaatcatcatacggcgtacgcggaaaagagttccaatcgctatccattggttcttctttatcaatcagcacaaacggaccatattgctgtaatagcttccaatagtagaatccacgaaggaacttcacttcagctttatactgttttttcaattcagcagtcagttcctcgcagagatccacattattttcaaacacaaatgaagcacggatagccttataataatttccccactgatcccattcgagattattgggtccccaatttcctacattcatactggcagtacaatagcgttcccatatcatatcacactcatccgaagcaccgacccaaggagcatctccccaaatggaatgttctataggcaattgtgaatagacactatacagataggcttctgtctcttttctgtttttccaaaccatatccatggtcttttggtcatcgggcattttatcaagaaagtcacacgatgagaccagtaatgccactacagcaaataagattatatttcttaatttcataataatatctatttaaaagttaactctcaaaccaaaattgtacttgcgttgcagtggataagcatctccacgtcctttaccaatttccggatcccacattttgaaaggagagaacaccgccaaattagtaccgtggaagtaaatacgcaacccacttagaaacatcggctccagccactttttggggaagctatacccaatctctaaatctgccaaacgaaggaaacttccatctacttgccatttcgtggattcctgatagttattggtagaaccaccaatacttaaacgaggataaaacgcatcctgacgaggattatcaaccgtccaacgatccagagcctctacgaaaagattgccacgatcaccaccttcctgaaaaggaacaaagccttcgcctcccagcatataagaaacgcgagtctgaccacggaagaaaataccgacatcaaatcctttccacatcaactgagtaccaaaaccataaacgatttcaggaatagacgagtaaccaatagcaacttcatcattactgtccacaatgccatcgccattaacatcaagatacttcacatcacccggacgtacagtaccaaactgttgcttaggacttctggctatttcagcttcatcattgaagtatcctaaagctatcagaccaaattgctgattatgtcttttacccacacgattctgatacttattctgataatcaggctgatcctgatcaagtacggtattatgcgtaaaggtcccattagcataaacacgcatactaaagtcgcgaaaactcttattatactcaatcgtgccatccacaccctgattctccattctaccaagattagcaaatggcatatcattgataccggcaataccaggcagagaattacgttgaatcagaatgtccttacgcttctcataaaagtaatcaacatccaaagaaacatcaccaccaaaaaactcggcttgtataccaatatttgatttcaatcccttctcccaagtcaggtttactactccatattgattctcacctgtaccggcataatttgtttcattcggcccgaaaatatatccgcccaagccatcacctacaatagtaagataagcgtagcggcgattattgggtaaagcctctgctcctaccaatcccatagaacctttcagtttcaacatgctcaccacattgtttatagaactgttctgccagaacttctcgttggaaattaaatagccaatggctcccgcagggaaaataccaaaacgctgacctttaggaaaattttcagaaccattgtatccaatattgaactccgcaaaataacggtcatcatacgagtaggtggcacgagccgccagaccttgtttacgataaggaagagaacggattgcttcagtagcggtaccatcacgatagtcacgatgataatacatgcccatacctcctacacggtgtactgtattgaatacgcgttcataagtaacctgcgcttttaactccatagcacgattcacttcctgctccgtttcgtaacctaaatattcatcaccaatagacatctgttttaattccagattaccggcatcatcacgcccagtggccatatagtaagattcttttttagtacgtttggtaatattcttagtataagcatcgaaggaaaacgcaacattagctttcagtcccggtacccatttaccaaagtcctgtgacaaacgagcctgaccattgaactggtttttaaactctgtacgataacccgaccccatcagacgctcagcaggattctccgtagtaatggagttgcttccggcccatacataatgttgactaccatccgcattaaaaccataaggataacgtacaggaatattaataggattctgagtatatgccttatcaaaaagttcagagcttgtcataccgggattatggctatctatcagccaaccaccgagttccagatcgagcgtcgtacttttactcaaagatacgtctacattggcacgataattatatttggtcagagaaatattcgatttataactgttagtcggattatctctataattaccatgttcattcataatacctactgaaacaaaatatcgtgcaactttacctccgccatgtacattcagtgaaatattgctattatcagagttcttcttgaagatctcattaaaccaatctacattaggatagagataaggatccgtacctaaacgggttgcttctattaccgcatcactataaataggcgttccgttggcttcattatacaattccataaaattggcaccatccagcaacttcggcatacgtgtcaactggctgacaccatactccatcttcaattcaatagatggtttctcagatgcctcacctttacgagtagtcaccaaaacaacaccattggctgcacgtacaccgtaaacagcagtggctgaagcgtctttcaggatagagacactttctatttcctcaggtgaaatattcgtcatagaacgttccacaccatctaccaataccaacggatcttgatttgcaccgaaagtggaaatacctcgaatccagaaactggaggcatcctgtcctggttcgcccgaacgttgtactccaataataccagccatacgccctaccaaagcattctctaaagagcgggaagggactttcaaatcagccatacgcacagaagcaatggaaccgatcacgcttgccttacgctgcgtacccatacctactactaccacctcatcaagcgactgtacatcctctgtcattacaatactgatactgaaagaatttgccacttcctttttcactgtattatatcctacataagaaaattccaggatttctcctttctgtgcttcaatagcgtaaaagccatcaatgtcggtgataactcccgttgaggtcgtcagattacggactgcaaccccaataagcgcatcgccctggccgtccaatacttgtcctttgatttgctgtttacccgattgtgccgatatgactccaggcaccgtgaccatcaatatacataaaaccaggaatgcaattctctggtaagatggccgaattaaaaaataaatgtttttcattctacatatgtttttattagtattacatacttacggggattccccgcaaaggctccaaaacatctgcaaagctatggctgctgtcttaaataaaggattaaacatagattaacaaccgtattaaccccaccatttttttattaaccgacacaatttcaatataaaaacagaatcccgccaaagccaaacaggtttccttataattagtaaccgattaacaaagaaattccatccttaacattcgcactaacccctttttaatccaattactaacttcattttcttaattttgcctacggttccaaaacacacatatctatttctcatatttattaattaaattaaccatgaaattgaaaaagctatttctcgctgccggacttaccgcggcagccaccgtatcggtaacagcgcagaaagcacccgaaccttgcggtttgactcccagtgcccgacagatagaatggtacaatcgtgaaatgattgcgttcttccacttcggcatcaatactttcgaagactttgtcaacgaaggagacggaaaggcatctacagccatattcaatcctgccgcattagattgcgagcaatggatgcaaaccctaaagtcagccggcataccggcagctatcctcacagctaaacatgccgatggtttctgcctttggccgagcaaatatacagactactgcgtaaagaactccacttggaaaggcgggaaaggcgatgttgtgcgcgaatttgtagatgcctgtgaagaatacggcatcaaagcaggtatttatcttggtccgcacgaccgccacgagcatctgcgaccggattatacaacagagaaatacaagtactattatgctgcacagttggaagaactaatgagtgattatgggaaaatatgggaaacctggtgggatggtgcaggagctgatgagctcactacccctctctatacccattggtataaaattgtacgcgagaaacaacctgactgtgtaatcttcggaacaaagaattcttatcctttcgctgatgtacgctggatgggtaatgaagccggagaagcaggcgatccttgctgggcaactacagactctattgctattcgtgacgaggcagcctactaccaagcactgaatgaaggtatatacaatggaaatgcttatgtacctgcggaaacggacgtatccatccgtcccagctggttctaccacgaggaagaagacagccgtgtaaagaccgtaaaagagttatgggatatctactgcacctcagtagggcataacagtgtgctattgcttaacctcccacccgaccgcagaggattgcttcattctaaagattcattgcatatagctttactgaaccaaggtattcgtgaaacttttggtaaaaacctgttagcaggcagccgtgccaacgcaactaataatcgtggagctaaatttgatgccaaatatctgatagataacgataaacagacttactatgccggacgcgatggaaacgtaaaaagtgatatcaccttcaccttaccacattccactactttcgactgtctcatggcagaggaagtaatagaactgggacaccgtacctcccgttggagcgtggaatactccaacaacggcaaaaattggacatctatcccggaagctacaggcaaacagtgtatcggatataaatggattgtacggtttgctccggtaacagccaaatatgtacgccttcgtattgaagacggacgcgcctgccccgctatccatagtttcggaatctataaacaagctgaaatactcaaataaaaaaacaatgtataaaattaaaagcatcatactatccggtatacttgccttctgcaatctttgtgccacagcacaaagcatagactcagggcaggcatatgagatacacacgttgagcggtcttgcaatggataatcaggaaagcgtggacaccggttccaaaatatttatttccagacgtgttcctggtaaagaatctcaaatatggcagttcatacccatagaaaaagatatttattgcatagtcagtcctctgtctcagcaagccattgacaatggtggagatggagctgtagaacgaagtgtcctgcaatggagcaatgatttgaacaactcaaaccagcgatggaaagttaatcggcaatccaatgggaattatatttttaccagcgtggcaagtggatataatctggggtttccagatgcaggcctggtaggagaacctgttttccagttgaaacctgacatccgccaacccaatcaacagtggattctggtcaaatcgaatgtgaaagtaaaagctgatccattgaaaacccacagcaacaatgattgggaaaaccaaaacatttttgccataaacaaagaagacggacatgccacattcattccttttgccaatatggaagaaatgcaagcagatcctgcttaccgtcgcccttgggaacgcacccgttccagccgttatgtattgctgaacggtaattggaaatttaactgggtgaaacaacccgaagatcgtccgaaggatttctataaaaccaactatgacgtatcagcgtgggctgaaatccctgtcccctccaattgggaaatgcatggctacggtacacccatctataccaatatcacttatccattccgtaataatccacctttcatacaagggcaacgcggctacacggtagaaaaagagcctaatgctgtcggatcttatcgccatgaattcactttgccggccgactgggtggacaaggaagtatttattcatttcgatggcgtatatagtgccatgtatctatggattaatgggaaaaaagtgggatatagccaaggagccaataatgatgcccgcttcaatatcacccgttatgtacatccgggcaaaaatcaagttgcggtggaagtctaccgttggtcagacggtagctatctggaagatcaggatatgtttcgcttaagtggaatccatcgcgacgtatatcttgtagccagtcccaaagtacaattacgtgatctgcatctgacttccgttctcagttcccgctatgacaaagcagaactacacgtgaaaagcaaaatcaaaaaccatgggaaagcaatcaaaaatgcttccgtacgtgtctcattgctcgatgaaacgggaagaaatctcaaacagttcgttagtgaaaccggtactctggctgccggaaaagaagtaataataaacagcaaggggagtattcgcgatcctaaactgtggagtgcagagactccctatctatatactgtcaatgtagaattgctggatgagcaggggaaagtgaccgaagccactacacaacaatacggtttccgccgtatagagattcgtaacaataaagtatatatcaatggcatgttgactctattcaaaggagccaatcgccacgacattcatccacaatatgggaaagcagtccctgtagaaagtatgattgaagacattcttttgttcaagcgtcataatttaaataccatccgtacaagtcattatcccaatgatccgaaaatgtacgggctatttgattactatggcctatacgtcatggatgaagccgatcaggaatgtcatggcaacatgtcattaaccaataatcccgcatgggaggcagccttcgtcgaccgtatggtacgcatggtagagcgtgacaaaaatcacccgtccgtaatcttttggtcattaggcaatgagtctggtggaggttgcaatgcagtagccgaatacaaagctgccagagctattgatgaccgtcctatccactatgaaagcatgaatgaccaggcagacatagactcgcgtatgtatccttctatcgaaagcatgatagcacaggacaaagaaccgcgaaacaaaccatatttcctttgcgaatacgcccacgccatgggaaatgccgtagggaatcttgaagaatactgggattacattgaatatcattccaaccgcatgatcggtggctgcatttgggactgggtagatcaggcactcaacaaaccgggtgaagcaaaagaccacctttactttggaggtagtttcggtgatgcccccaatgacaatgacttttgctgcaatggtcttgtcacagccgaccgtcgtgttactcccaagctactggaagtaaagaaagtatatcaatacatctcattcaagatgaatgacaaaaacagtgtcgaactacacaatcgttacacggttcacaatatgactcacttcaaccttcactatacacttgaaaaggatggtaaagttattaaagaagaagagttcggtctgcccgatggaaagccaaacgaacgccgtaccattcatgttccaatggagcgttatctgactgaccctaatgcagagtatttcgtgaattttgaagtgaagctgaaacatgactgtgtgtgggcccctgcaggccatgtagtagcaaccgaacagtttgctctaaatgagaagattaataaaccctctgaaatcaagactgatactacgggaaacgaaattctaaaagcttacgaagaagaacgccgttacgtacgcttcgaaaacaataactgcggaatttcattcgatatggctaccggacaaatgatcggcttgcgctatggtgcacaagaagtattgcatcggcagcaaggtcccgaatttaactggtatcgctccatcaacaacgatccccgcaattgggccaatacgcaaatcagacttcaggatttcacatggaaacaggccgaagataagaagtctgtaactgtaattgcagaattggaggctatcataggaaaagttaatgtcccccataccataacctacactatccatggaaatggtgccattgatataaaagccagttttaaaaccggaaccgactttaatctgccccgccttgctttacaaaccagtcttaaccctgctttggataaaatcacctggtttggacgcggccctattgagaactaccaagaccgcaaaaatgcagcttacataggattatattctactaccgtagaagatatgcgagaatactatgtacgtacacaaagtatgggagaacgatgcgattcacgctggttaacgctaactaacaatcatggaaaaggtattaagatcactccggaaggtactattgacttctctgcccagcactacaccgaccgcgaattatggcaagtgaaatatgctcatgaccttggaaatatccgccgttccgaagttgtattaaatctggattgtgtacaacgcggattgggcaatgccagttgcggaccaggtccacgtccgaagtatgagattaaaaaagatagcgtatatacatacgctttccgcattgaagaagtaaaataaatcagattcttaaagaagaaatcaatatactcaatataaaaaagcagaaatacttgacttcgcttttccaatgtagtatatttgtattcgtaatcttaattctgattcaaatttagattagcataagaggaggggcatagcttctcctctttttgtacctatccattccatagtatttcaaatgccacactttagttccccgaatgccacacctgaccgaaccaaatgccacacatccctactgttgaggtatggcattttaatagttgaggtgtggcattcggggagctaaggtgtggcatttacaccatctatctgaggcaaacaggccatctgtctgcatgaaacacagggtgcgttcagggcaaacagatggtctgtttcaaaagagtgttatttacgctaatgactatgagattctttcatcaacagttaataatatagaaatctgctcttgacaagatttccatttcagagcatcatttactgtaagaatacggaaaatcttccagatgtattcctctttctctattaggaacactatccataaccagacggaattctccaccgcctaccaactcttcatgtttcaaataattacgagtaaaccctttagcatttaattcagccgaacgaatataacaattagtatctgatacaccttcagcatcaatcgtaaatgttttctctccgggcaatgaaagagtagccttcggaaatagcgggctgcccaaaacatattcggatgcaccgggacacaccggatagaagccaagcgctgtaaatacataccaagccgaagtctgtccgttgtcctcgtcaccgcagtaaccttccggacccgaattatagagcttattcataacattgcgagtatgatactgagctttccaaggctgaccgacataattgtacaagtaaatggcatgttgcacaggttgattaccgtgagcatattgccccatattcagggcaaccatttcagctatctcatgaatgacaaaaccatacgtaccgtaattgaaggtattgggagcgacgaacatagagtcaaggcgacctgccatcagctcatgaccacctaacaaggacgacaagccttccggatcatggaacacactccaggtccagtgccaggaacagccctctgtaaaaggacctccccactcagttgcatcgaagttatcacgccacttaccattggtatcctttgcccacataaaacctttctccggatagaacaggttgcgatagttctgagcctttttataatattcagctgctacttcctgatgtcccgtctcttccgcaaaacgtgccaagcaccagtcagcataagcatattccagagtcttggcagtcgcctcatgcacttcgggataaggaacatagcccaaacgatcatattcagcatatccgtcacgtcccacagaggagatctcttcactgcgtgcccgcgtctgattcagcatagcctccaatgctttatctttgtcgaatgtccttatacccttcatccatgcatcggtaagcaacgaaatcgaattgtttcctatcatgcagccacgatgcccaggacttgcccactcaggcatgaaaccgctttcgctgtatgcattcacgattgattgcatgattcgttcgcttacttcgggataaaccaatgtaaataacggatgtacagcacggaaagtatcccaaaagccattgtcagtgtacatatatccgttgtgtatctgcccgtcataagggctgtaataaaccggtgcctcattcttatcgaactcatagaattcacgcggaaacaagagcgtacggtacaggcaggaataaaacgttttctgctgttcctccgtacctccttccactttgatacgtcccatctgttcatcccatactttctttgcagctgctgagacttccgcaaaggaacgtcctttcacctcacggtccagattcaagcgtgcctgttcgtgattaatgaaagaagacgccacacgaatagttaacttctctccggctttcaaatggaaaccgacatatgcgcaagcattctcgtctgttccggattctacaataggcttatcaaactccacaatgaaatgattgccaaaattatcgggaactccaccgttattgtaacgggtagttccataaatacagttccgctctgcatccaaagccacgtttcctccatgctggtatgcatcaatcacaatatattgcccttcctctgaaggataagtgacctcgaataccgctccgcgagacgttgcagacaaagctgtggtaactccgttgtcaaacttcacctgataacaattcggagccgctttttcattttcatgacgaaagcccaccccacgactcttgttatccataataaccttacccagtagcggcatgatggaaaatgtaccataatcgtttatccatgggctgggctggtgtgtctggcggaaccctcttatcagactgtcagtatacatatacatccatccactaccgttctccccggtctgagggctccaaaaattcattccccaaggtacggctaccgccggatatgtgttaccatgcgagaacgcgaatgtagaagatgtccccatcaagggatttacaaaagatgccggtgacggctgagtctgcatcttatgcccacatgatgccagcaaaagacaaagactaaagagataaatcaactttttcataaacattaaaagattttatttaagtattcaagtgtctgttcggggtgtctgctcatacgcaaacgccatactagttcctgcatattcaccacttcaaaacgaccgtccagcttcccggcacaaagtctggctgccgcggctccatgagcattcccttcaaagcgactccaggcatgtacacatatcgccgaaaagctctctacctgtgcttctgctttcagttttgaagcgatgaaatcaggagaaccttctcgctcatgaatcctatcccaaagggaataccttacagtaataaccgggatatcatatccattcttattcgttacccaaaagacttctcccccgcctccggcataaggagaatattgtagagctatgattccctccaatcggtcattcgcatccacaaaggcctgataagcttccttagacgctaccgattttacatccatagccattacacccagcaatcctacatgataccggcgcatagaaacagccaatcgttcagctgcaaccttcaggttatcattccgattattattctgactgtatgtatctatataatagtaacctcctcccagcatttccagcacagaacattcatccctccgcaggttcatcagattatgcagttgggcaggcgccatcatagacaaagtagaaacaggtaatccatagctcattttcacttcaattgcctccggaacatcgtaaaagctggtggcaaagtcctgcatcatccattggatgttatcgccatctgagagaaaaaaggaaacataattacgtttcttaccgaaatctataaatttcggattgaaagattgagcctgtacaggctgttgacgctccgtataaagcaatgatgtaagagaatgattgtaactccagtcacaaggaatcataggatgtccgctttttgatatacgagccacaaactggtcttcacttactccctgttcccacccatagaccgggacattcggctgtagccaagcaagcacttcttccagtagatccacgttttgaccacttcggggatctccttgcttcttgttcagattcaatacaaacaaattattcttgatagcaaattcacgcaattcacctgtctggacaggcataatcaccaaagcctcattgttacatttatctttgaattcgtgccacgcatcgagtgttgttttgtgggtggcatcatacttcatactatatccggccttttcaaaatattctttatcgcgaacatctacaataatcgaattataaacgtgagaagctacagaagccactattccactctccggattatttttcacatcagtcagcacatatccatcaaagaaacccttcagttgaacacgcaagccgtccactgattcataatcactacatgccagctccagaccattctgtacgccctgctcacagatacccatatcttccaatgcttgtttggaaactttataagatgcctttccgccatgatcgtacaaccagactgcaacatcacttttcccttcttccaccatacggtttgtcaaaccggctaatgactggcatagtagatgatattgcaatccctgcatggtttcggtctcattaatactgttacgattatctattgaaacgaccccggtacaagtccagaactttcggggtttcttcttcatttccggcatagaatacagctttccgtccggaacaaaagaattgatttcctcacgattcaacaatcgtcctaaccccaaagcagacagactcaaacctatcaaagctacaatggcacttatcttcagtttcatgaaataattagtttaagaattattcgtcaagattttcaccgccaaaatagataaagaaggttaagcaaccgcttaactatgggttaagtacagattaattcacgaaaagaatcgttaaccctgcataaatagggctattcatcgaagtttatatagaaggaaaggtgacgaattggcaaaaaacatttcacgatatcggcctgaatgatattcgacggacttatctatttatggttgcctgattgacagctaacaacccttattacgtttcaaagtgacaatatatccttattttctctaacagacattgatttacaaatcttcattccagaatgttcggtgaataagtaatggataggcatgcgctgtttttgcatattattgcgcgtttgaaagctgtttatgcaaaaaagggttactacttacgggtgatatgattactacttccaggcaatatgattactacatccgggtgatatgattactacatccggaaagaagacttattcttatcagggttttcattaataagtgtacttcgggaagctctttttgagctaaaagaaatgtaataatttagataatcatctaatagattgctacttgctcattttcattcgcgtattttttatctttaagggattcgttggaaacagccgattctcagtcggttaaaaatgcaatttgtcaaaaggacaatcccacctctcccaaaaagccggcagaaataaaagaaagatcacgattatattttatatataaaaagaaaaggtgaccaagcagtgtttccaccacttcatcaccttttccatcatttatcacctaaacctatatattatttgtctgtgcatccttttgtgctgaaagcaaccagcatccaaaccatcttttcctgttctttcagatagcctgtcatcaggtcggcagtaacgtcgtcgcctgcttcattagccagttcaatgatctttctctcctcaccaatgaggtatccgtaagtttcaagaatattgctgatcgcatcgctgccgcaagccacgtcagatacttctttgatctttgcaactttcaggtattcgctgaacttgttttcgggtacaccacccagcatcaggatacgttctgcaatttcgtccaccttctcggctgcgtcgtcatacatactttcaaacttctcgtgcaatacgaagaaaccatgtcccttgatgttccagtggaaaccgcgcagattcgtgtaatatacctggaaatctgccaaaagttgatgcaatgcagatactacgttagctactcccgattcatttaacttgatataatttaaagtcttcataattctatggttttaataatttatactgtttttcttttttctgttgcaaagaaagtgcaaatcgaaggcagaagcaagcttgcttgattatgctgagatgcagcctttcttcgttttttgtacaaagataaggcggaaacccatgcttgtcaaacagataatttctatctttgcatagacagaatctatataacccgttcaaaccccttatttatcatgactttacaacaactggaatacattcttgccgttagtcagttccgccatttcgccaaagccgcggaacattgccgtgtaactcaacccaccctgagtgccatgatacagaaactggaagacgagttagacaccaagatattcgaccgcaaccaacagcccatctgccctactcccgtcggacaacttgtaatagagcaagcccgtatcgtattggaacaggcaggccatataaaggatattattgaagaagagaagcactccttatcgggtgtctttaagttaggtatactccccaccatcgccccttatctgttaccccgcttctttccgcaactgatgaagaaatatcctaaattggatatccgcgtaacagagatgaagacgaaggacatcaaacaggctcttataaaaggagagatagatgccggtctcatcgccaccctgcctgaaaaggatgacttccgccagatacctttattctacgaacaattctatgcttatatcgcgcgcgaaagcaaactgttcgataataagattatccgtacctccgatctcagcgacgaacagctttggatgcttgacgagggacattgcttccgcgaccagttagtccgcttctgtcagatgaaggcggcacaagccagccagatcgcttatcatctaggtagcatggagacattcatgcgtatggtagaaagcggtaaaggcgttaccttcatccctgaacttgcaatcgatcagctcaacgatacacagaaagagttggtgcgcccctttgccattcccactcctacccggcagatcattctcatcaccaacgaacatttcatacgaaccactttattggaggtactcacaaaagaaatacaagcctctgtaccccgcgaaatgctgtccctgcgggcaactcagtgcgttgtatagatttcgtctatcggcccataaatcttttcaatcgttttttttgttctatcggcaaaagatgctatatttttgcatcagtaaaacaaagtactaaaccttttaaaacaaaaaagattatggaaccaattatcaattctcagcttcctgaattcaaagttcaggcattccagaacggaagtttcaaaacagtaactaacgaagatgtaaaaggcaagtgggctattttcttcttctatcccgcagactttacgtttgtatgccctaccgaactggtggacatcgctgaaaaatacgagcaattccaggcaatgggtgtagaggtatactcagtaagtaccgactctcacttcgtgcacaaagcatggcacgatgcatccgaaagtatccgtaagatcaagtatccgatgctggcagaccctacaggcgtgctgactcgtgcattcggtgtaatgatcgaagaagaaggtatggcttaccgcggcacatttgtcgtgaaccccgaaggcaaaatcaagattgccgaaatacaggacaataacatcggacgtaatgccgacgaacttctccgcaaggtagaagctgcacagttcgttgcaacgcacgacggtgaagtatgtcccgcaaaatggaagaaaggcggcgaaacactgaaaccaagtatagatttggttggtaaaatttaagttcacatcccttttttattagcgaggtcccctttatccattgcacacatagagggggcctcttttatcttacattagtacccgttggcgagattagtttatatcgatataggaatgaataagactcaccacagattacacagattcacacagatttattaatctaataatcagtaaaatagaatctgtgtcaatctgtgtaatctgtggtaaattaattcataaccgctcagaaacgaattaatcccgccaacggaatacattaatatagactgttatgttagaaacaagcattttaaatcaagtacgcagcgtcttccaaaacctggaagcgcagtacacttttcatatcacctgccatccccggcacgaaagcgcacaggaactgacagagttgctgaaagatgtagcagggtgttccgataaactctcctgtgaggtaactgaaaccgaagaaccgaagttggaattctctttgctgaaaaacgggaaagaaaccggtgtcaaattccgcggaataccgaacggtcatgaattcacatctttgcttctggcagtactgaatgccgatggaaaggggaaaaatcttcctgatgaagccatcagccgacgcatccaggcgttgaaaggacctatttcattgcagacttatgtatcattgacatgtaccaactgccccgatgtggtgcaggccctgaatataatggctttactgaacggacaggtcacacacgaaatgatagacggtgctcttttccaggaagaagtggatgcattgaaaatacaaggcgtaccgtccgtctatgccaacggtaaattgcttcatgtaggacgcggcaccttaggcgaacttctgcaaaagctggaagaaatgttcggctccgaacctgtgggaaatgcagaacctatctcacggacttatgatgtccttgtattaggcggtgggccggcaggtgcctcagctgcgatttattcagcccgcaagggattacgggtagctattgtagctgaaaaagtcggtggtcaggtaaaggaaaccgtaggaatcgagaacctgatttccgtgccgcagactacaggtgcacagttggcagacaatttaagaagccatatcaatcattatcccatcgacttgtttgaagaccgtaaaatagagaaggcggagcttcaaggaaaagaaaagaggatttcagtagtgggcggtgaagtattcatatctcccagtgttatcatcgccaccggtgcaagctggcgcaaactgaatgtggatggtgaaacggagtatataggcagaggagtagctttttgtccgcattgcgacgggccgttctatcagggaaaagacgtagccgttatcggtggaggaaactccggtatagaagcagccatcgacttggcaggtatctgccggaaagtgactgtctttgaatttgcggatacgctgaaagctgaccaagtactgcaagaaaaggcgcaaagcttgccgaatgtagaaatcttcacttcttcacagaccacaaaggtagtgggaaacggtgataaggtaactgctatccgcgtcaaagatcgtgtaagtagtgaagaacgggatttcccattggatggtatcttcgtacagattggtttggcagccaatagcgctcctttccgtgacatgctggaaacgactccaataggcgaaatcaagatcgacgctttttgccgcaccacacttccgggagtttatgcggcaggagatgtctcgaacgttccctacaaacagatagtaattgcaatgggtgaaggtgcaaaggcggcactgtcggcatttgatgaccgcatccggggaattgcataataggtacgcggacgacgcggatagagtatcttcattcccctcctcctcgggaggaggggaatgaagatagtactgtcaatcatctacctatctgtttacaagaaaggaattcaacgatatcctctttttctgccatgtccaatttctgccgtatgaccgtcttacgttgatacaccgtccgtatgctttgctggataaccacgctaatctctttcgtcgaaaagtccgactttaacaaacagcagagttgcaattccttttcattcaggatatttccatacttctgactgatacgggtataaaagccatcatgtaccatgtcgatagtcttatataaatcactccaaaccagcaaatcatccaccgctacatctttattggctatccgtcccatctgtaccaatagctcctgatgatcggaactgggattcgtagccacaatacgtatcagacctaactgctgaagcagcatcttcttgacaaacttatcattattgccgctttcatcgccttccgtctcatgcagcagacggcgcaaggcctccagttcttcttccttttccacgagtaaatgctttcttcgctgcaaataccagacgacagtcagcaacaacaaaatacagagagccaccactccgacaaagaaggtccgttctttctgtttttccagttgcagattcatattctgctgttggagtaacaattgtaccttccctttttgggctatcacccgttggtcacggataaagttgttatacaaccggtttgagaagaacgccacatcccggattgtaaaagaacggctatctatataattcatcaacgttttctgtaccagataaaagttagctaacgataagtcctggtcaatatagggcgaacgcacactatcccccatttgtatatagtagcgggcggaatccacctgccccatattcaggaaataacgtgaaagagcataataagataaggactcgaaaggatgtttcgtctctttatactcttgtaaactatggcgttgcaaattgatggcttcctgattcttcccggagtcactcaatatatcagcatagttgcgcatcacatagtataacgcctttagagagtctgcggatgtatacaggcattcggtagctttacggagagccagcagcgcagaatcattctgatttgcacagtagtatgatatcgccagactgttgtaattggaatatcgccgggtggaatcaggctctatagctatcaattgcttctgcaagcgtatcagaccttcaaagtcatcattaccttcccctatattcgctacggaccgcagcaaatcaagacgggctgccgtatcaccacgcagggctgcaatgcgattcccttcggccatcatctcagtggcttctttatatctctcgctatcgtagaagtaatgcgccgccagtttataggtacgcagtaactgcaatgtgtcgcgtacgtccggcctcccataataatccagagcgtataatagcaaagagtcttcattcatcacccaatgcgcattatagtgggcttgccccatagccaatgcaaaccgtgcccgcaatgaatccggcaatatttcgggatctttcaccgaccgaagcagagcaatcgcctcctctgcattctgctgtaacatctgctccgccttttctatctggatgcgttgcgacggcagggcttctgcacatgctgccaatgccaacacgcatacccaacctatcaaaccatgtttcaatgctttcatgccgtccttccttcttgctttaagtctttgcaaagatagatatttatcaattaacggaagttacggcatcccattttttgcacttttctttatatataaacttgaaataggaagatataaacttttctataaaccgcagttcaaaacactttaattatcagatagttgcaaaacccattgcactttatttagtgccacatataaaccgtttttctcccccgatccccctacctttgtcatgttcaaagaacagaaataatcactaaaaataataagtaaaatgaagagactaagtatcatttcaggagtattattcctatgtacctccctgatggcggcaaacaaaatcacagggaaaatcatcgatgagagtaacaatcagcacatcgagtatgccaatgtcagcctgctgactcaggattcgacattcatcaccggagttgccacagataacggtggcggcttcctgctgaaagaagtaaacgatggagattatatcttatgtatctcatgcgttggatatgaaaactcctatctctccatccgcaacctgcaagccaacctgaatctgggagaactgcccttatcgcccgacaatgtaatgctggaaggtgttaccgtcacagccagccccatcatcaaaaagaccgaccggcaaattatcctcccgaccgaaatgcagactaaagccgcttccaacggagtttccttactgagaaatctacaactgtcgcgcatcctgatcaatccgatagacaacagcatcacgattcccggaggagacaatgtgcaacttaggattaacggcgtagaagtgactcaacctgaaataattgccatccgcccgacagatgtgatccgcatcgaatatatagacaatcccggcgcacgttatggaaatgcaggagctgtattgaactacattgtaaagagaagagaatcaggagggagtatctctgccgatctcaccaacggagtatccgatacgggatatggcgaacataacctcgccgccaaataccacttcaacaagtcagagctcagcactaccgtatattggggacagagagatctgaagtggacacgcgaaaacaatgaaagtttccacttcccggaggcttatcaggagaacagagaagtgggagaaccgaccaaagtaaagtatgataaccttaacttcaacatcaattacagctatcaggataatgacaaacaacttctcaatattgctctcagaaatcaatacagcgatactcccagttccatgtcggacagaatcagtacattgtatgaaggagacacctcctactccatatccgacctttctacctccaaagtagttatcccttcgttggatatctattaccagaggaatctgaaaaacaagcagacaatctatgcagatatagtggcttcttatctggacagcaagaatgaacggacttttattcagaaagcccttaataatggcaataacgatacggatatctattcagaaaccaaaggtaagaagtactccatcattggagaaggtatctacgaaaaacaattcaatacgggtaagtttaccggaggcatcaagcatacacaggcctatttgcaaaatagatattcgggtaatatagagaataaaatcacgatgaatacggccgaaacgtacctatttgccgaatatcaatcaaagataaaagctctgaactacacagtagggattggagccatgagaacttataacagtcaggagcagtattcttccgagaagtatatagtcaaaccttccttaagcctgtcgtactctatcaacgggaagtggtttttcagatacaacggatacgtgtcggggtatgctccttccctgtccgatctgaacgacatctcgcaagcaatggataagtatcagatacgcaaaggaaatcccgacttaaagtctgttacattctatgccaatacactgtctgccagttggcaaagcaagtatgtatctgtcgatttatttggaagatatagttatgacaataagccgattatggaaaatacctactacgaggacgggtattttgtccgcgctaccgagaatcataaaggtttccaccggatcaatctggagacagctatacaaatacgaccttacaaagagtatatctccattaaaatcactccgtttctgaaccgctatatcagctatggcaacacctacacgcatacacacaccaatgcaggactgcgaggcagtctgatggcaatgtacaagaactgggtactgatggcagaaatgaataccagcaaccacactctgtggggtgaaacactgactaaagaggagaaactacacaccatcatggcaggatataatacggagaaatggagcctttctgccggagtgttgaacccgtttaccaagaagtatgaacaggaaatagaaaatttatcaaagtcggctccctaccgccagttagcgtattccaagaacttaaggcttttgttcatggtaaatgcatccttcagccttgacttcggaaagaagcgcaacagccaaggcagaagaatcaacaacagggataccgataccggaatcttgtccggaagcaagtaattgtctccctcacgaaaagcagggatccgtccactaattgagaatattcaattcctggatcaggttccctgctttcccgtatttctcaatcataaacagtatatagcgcacgtccaccccgatggtacgctgcatcttcggttcataaagaatatcactgcccatagcttcccagtttccatcgaaagccaaccccagcaattcacctttcgaattgaacatcgcactaccactattgccacccgtaatgtcattattagagatgaagcacaccttcatttcgcccttttcatcggcatatcttccgaaattgcccgaagagagtaatgaaagtatctccggctgtactgcaaaatcaacatcacccacatgagctttcactttctccaggacaccctttgtcgttgtataataatcatattccgctccgtcaaagggagtataaccgcataccgttccaaagctcagccgcatggtggaattggcatccggataaaagttacgagacgtatacatccgacggatagccccattcagcaagcgttccccacggatgatctccgtagtaggtgcctgcatctgcatattcatatcgaacaacatcgtcagcatatcaatgcccaacgagatagccggatcatcgaaaatctgataggtagtatcccgttcaagaaagcgtttcaaaccacggggagtagtcaactcagaacttgcataaagactatctacgaaagctttctcatccccattatatttctgtgcgatagtatggtagatttccggcaggaaagtggtatccacttttgagcgatactccttcaacagtgccgtaaatacttccttgtctatatccagatccaaattagagtattgctcaacgatatctttcaaggcggcaataactgttttctgctccccttcaaaatcgaagttcagaatcttcagtgcaagctgcactaattccggtccatataagaaggactcgataaagtaagcctgtgcacggtttacctcccggcggttcttataattcagttccaggtctgtaaatagttgaagaagtttctcacgttcgtccgggttttgctgtatccatcgacgaatttcctgttccatttcacgtttcttctccaggattcccagcttacggatagcacggttgacaccgatactgttcttccagtaattggagctttcatcgtatttggaagcatacttaatgcgtatgctgtctttactgtccatttcacgtttccagatggcttgcttcacgccacggatgtcaatctgcgcctgattggagttattcatcatttcctcgataccgaatgaagaaaggtaacgttccgtacttcccggatagcctatcgtcatacagaaagagccttccttatagccatccagtgaaatcggcgctacatattcagggtgatacgggacattgtcgggggagtaatcggcaggctggttcttgcggtctgcataaatacgaaacacacagaaatctcctgtatgccgaggccacacccaattatccgtatcccaaccgaacttaccgacagaggaaggaggtgcaaacaccagccgcacatcgttgaaatcgcggtaaacggagagccagaactcattgcctccataataagcatctaccacgccaagcaaagtggagtctttcagggatacctcaccgcctattaccatcatcatagagtctaccgcactggaacgttccatctcgttcatcgaaggtttaacggctcccagcacacgcttggttacatcttccgtacgaagcagaaaacgaacataaagctccggattaggcaattcctctgcacggctacgggctacgaaaccatctttcaggtaatcatgctccaccgacgaatgttgctgcacactactgaaaccgcagtgatgattggtaaacactaacccgtcttccgacactaccacaccggaacaaaaccctccaaagctgactaccgcatctttcaacgacggtttcttcggattatatagtctatcggcaggcatttgcaggccgagttctttcatagtcttacgggtctgtttattcaggtttcccagcatccacataccttcgtccgcctgtcccgtcaacgtgaagaggctgcaagctacaattaggatacactttagcttcattctatacttggtttaaattacaatttatatcttaagttaagagtatataagaaatatctaactcagttcccctccttcgagaaggaagggtgcccaaagggcgggatggtaggtaaaaaaaatccttattttatgactaataagtcctttataacttcagctaccacctccccctacgggtactcctccttctcgaaggaggagaatttagttagatttagctcatggcatactctcattttgaataatttagtatgatatactttccaattgcgtcattctgcaatcagtcttagttttttcgctccagtacgtgctttcagccattcggtaatcttctgtttctcatgggtgtcgggatgtttaccaaacttcagcacagcaagtgtaatggtatctgtccgtaccgaatcaaccgtcagttctatggcatgagagatagaaacagttttcactgacggatagagaacttttagctccggaacgatcgttttgcccaattcatcgaaagatttgtatcttgccagactctgttccagcactgtaattttctttgtttgttccaccagtcgttcctcactgtttttatagaaatcttccatcaccatagctcggatagaagaaatatccacagcttcattattcattccctgaagaacgatcaacttcgtttcacctaacttatagtccttcatcttgttgcgggcaatggcaatcgaagcttcgggaacttcttgtccgatcagtaccacgcgtatttcattgtctttgttgccatgataatggatttttttatccaatacctgtgtattctcaaaagaaagctgttcggcaacaaaccgattggcggcactctcatagaaagtactctgaataatgcctaccgtcaagtagacggccggacacatagtcagcacggcaatgagtattatgtattggcgtactttcttctcccgcttcttgtccacaaactctttacgctggaagtgcatcacacgcacaccggcaaacgtggcaagactgatgaataccgaattaatgaagtaaagatagaatgctccgaggaaataaaccagattccccgttgccaacccgtaacctgccgtacagagtggcggcatcaaagccgtagcaatggcaacaccgggaatcacatttcctttctcctttgtagacagggcaactacaccggcaagaccacccatcaatgcgatgaatacgtcataaatcgtaggtgaagtacgtgccagaagctccgactgcccttcggcaacagggcttacaagaaagaaaatagtagccgtagttacgctgaacagggtggttatcagaaaactcttcagtgaacgcttcatcagttcaaagtcattcagaccgacagaaagtcccacacccatgataggtcccatcaatggggaaatcaacatcgcacctatgattacagctgtagagttgacattcagtcccaacgatgccataaagatggcaaagatcaaaatccacaggttagcccctttaaactctactcccttgcggatggagtctactgtttccagctcattgtccttgtccttcctcagatcaaggtactcgctcaggaactttttaatggcaaaaacattccggttttgttcaggtgtttccatcatatcatttacaatttgacgatttacaatttacaatttaccatgcggctcatttagtgttttaagagtttgttcagaattggtatttggttcagcggtaaatcacgcttaacgacatacgcaataaacagtaacagcaaaactgtacgatatgccatacgcaaatagatattgtctatcgatacatattcggcagctacataaagcacagcggcaagaagtacatacatgcctatcgccttcaaatcgtactgtatcggatatttcttctgaccgacaaagtaagaaagcagcatagcaacaccgtatcctgtaaacccagcccaggcacaagcaatataaccatactgcggaaccaggaagatattcatcaaaatcaggatgatacagcccgtcaatgagaaataggctccccaacgggtctcatcaatcaatttgtaccaaaaggatagattgaaataaatccccataaagatttccgccgccatgacgataggcaccacccgtaacccgtcccaataatcacgtccgatgacatgacgcaggatgtccaagtagaacatcacagccagaaaggcaagcaaggtaaaaataatgaagaacttcatagcctgggcatacatttcacggctgtctttctccttactcttaccaaatacaaaaggttcataagcaaagcggaatgcctgggtaaacatagccataatcatggctatcttactggcagctccgtaaataccgagttgtatggtagcttccgcctcatcgggataaacgaaaggaaaaataatcttatcagccacctgattcaagatgcctgccacacccagaattaccaacggcagagagtaccgaagcatccgtttcaataactctttatccaacacataggtaaatcccctcagttccggtatcatgcacaccataacaacagaggtacataccagattgaagaggaaggcataccccacgtcattcccttccaatatgacataatagaaaagattgagtgcaatattgaggaagataaacagcaacttcagtgcagcaaacttgatagggcgttttttatagcgcaaataagcgaacggaatactttgaatggcatccattgctaccacaatcatcatcataccgatataccagggatgttcgccgtattccagccatccggcaataggttccagaaacaacaatcccaaagcaacgaataccaatgaaccgatactcacgctcaacaaggtggtagagtacacccgcatcgggtcatcctgccctttattggcaaaacggaaaaaccccgtctccatgccacacgtcagcaataccagtatcaatgccacccaggcatatatattcgtaaccacaccatagccacccgacgatgcaggcaaagctatcgtatatacaggcactagcagataattgaggaaacgccctacaatactactcaccccgtaaatagccgtttcttttgctaaactttttaatcccgccactttatttaatgattaacgtttaattattaatggttaacagtactatctccattctcctcctcccgggaggaggagtaccccaaaggggggaggtggtagaaagaaaacttctcctctatctcccatattatctgttccggattctcaaaatactgtcctattttcaaaccgtaacacctcaatgtcgtctaccctattcagaaaataactacgttgctcatcataatcctgttgtctattatgtacctcaccatccaattctatagccaattttatctgcggacaataaaaatcaagaacatatggcccgacactatgttgacaacgaaattttaaaccggctatttgtttccctttcagcattctccaaagaatagcttcggcaggagtgctatggttgcgtaactcttttctattgtcggttacgtcggatttgttcatgatggtttgcataagaatctttttttacctaccacctcccccttcgggtactcctcctcccaagaggaggagaactggaaatggtttgttgtgaccattttctatttgaaggtagtactgatgttaattgatcattaatcactaaacaacgtacgctgactattgtaaagactacgtcctaaatgtttataagccagttcagtcacttcacgtccgcggggggtacgtttcaagaaaccctctttgataaggaaaggctcatacacctcttccaaagttccggcatcttcacccaatgccgtagcaatggtagtaagccctaccggaccgcctttgaatttatcaataatggtgcaaagtatcttattatcgatttcatcgagtccatacttatcaatattcaatgcttcaagagcgaagttggcaatctccgtatcaatgctacccgaacctttcacctgtgcaaaatctcgcacacgacgcaacaatgcatttgcaatacgcggcgttccacggctacgggaagcaatctcagacgctgcccttgtagagcaaggtacattcaatatccctgccgaacgacgaataataccgctcaacacatcgtcatcgtaatattccaaatgcagattaataccaaaacgggcacgcaaaggcgcagtcagcagaccgctgcgggtagtagcacccaccatcgtaaacggattcaggtcaatctgaatgctccgtgcagacggacctttatctatcatgatatcaatgcggtaatcctccattgcagagtacaggtactcttccacaactggagaaagccggtgaatttcatcgataaacagcacatcattcggttccagactggtaagcactcccgccaaatcgcccggtttatcgagcaccggaccggaagtaaccttaaaaccaactcccagttcattggcaataatattggaaagcgtcgtttttcccaatcccggaggcccgtgcagcaatacatgatccagcgcctcgccacgcaagcgggctgctttaacgaagatacgcagattgtccaccaccttatcctgtccgctgaagtcttcaaaggacaacggacgtagtgcgttctcaaaatcgcgttccctactggtcaactgattatcacgtatatcaaaatcttctcgttccattctatatttatctcttttcttatctttttagaaaaagaatagaaaacaaaatcaaagctgacaatcagccacttaaatcttttctttttctatttcttttttatttctttctttttttaccacttatttcagtgtataacgcctatcagtacgagccccttctgttatcaattccacatccaccatcgaataaaccatcttcctcaactcctgtaaatcgacttccggtaaccgacccgcaatctccgaaatagttgtcttcaaatttacctttgcgttctttatcaactggggattcacaaaaaactgagtacctttcttcgcaccatttcttccgataatattatctttcaacaacttatctgtatagctgcgtaaacggtctgcttctcgcaatccatgtctccatattttggttctattgagcaaagatagtacaaactgatgaaccctatctatttttcacttaattttctttcctcgcttcatcattccgtccttctccgcttactcatgcagaaaagaaactctgcctctgcggctcacatgcaatcatgcatcatgaaaaaagactgcacaaggaataacagccttaccgtatatcaacacaaaagcaccgtatgagaaaattccttcgcatacggtgctatatatcggacgtgcagcatctatagatcggacatgttgaatctatagatcggacgtgctgaatctatagatcggacgtgctgaatctatatatcggacatgttggatgtatagatcggtggcgttgggtagaatccctttttacttcaccatttcacctccgtaaacgtaattttcttcacctgcggactccacggctgtgaactggaaataacccaatccaaccgttgcaggaaggaggctccatcctttatgccgggaaccagaacacggcacttcgtacgcacccctttcataagactcacggcatttccattcgtcacaaacgaatcggagttacctacatagaactttgtattatatccggggtaactatttcccttgtcatccaccccgtccgattgatccctattgaaccaaacccgccagtcttcccggttattggtcagcagaaactgaaattccaccgcatcggcattcttcacgcacgacagaaactctatcttcacctccgaatcgcaagaaacgatttccccgcacgagcctttgccttcggatggctcatctccaccaccaccttcactctcaccaaatttcacgctgatttccacaggcatggattctccgtcagcctcaacaagcagatttgcggtcatatcctgacttatcttttcacggtctatattcactatcaccgtactgttcttcccctgagccgtcgtcccgtttacaggagtcactttcagccaagattcagtaaacgtaacactccatgaaacagagccggaagtaccgatattcattacatcaaaagttttggatgtctcctctttggcgaatgccaacgagttcgtactcaacttgatgcgcgactcgccccgctccagcaccatatcgccggaagcctgctcgcccgcaacaacggaaatacgtttcgtattcgttttatatccattcttcgatatctgaatggtgtactgtcccggttccatatcaaggaactcaaaacgcccgtcgctacccgtattcgtcgtcttacctctcggattcaaaacgacatagactcccgaaaccggctcaccgttatcggcatcattcacaattccataaatggtgccggttgtgtctacttcatctttagcacatcctgtcacaattaataccgcccacgcacaacatactaaaagaagcgccaaacctaccttacttgttttcatgattattctttaaataataaaatctttaaaaattcaaagcaaaacttatcccgttacattcgcctgccgatggatacatggcaaactgtacaggcttatgcacaaccgcccttttacgcccattcatcacaattgcatcaatcagattgtaaacataaagagccgctgccgcgccaatacacacattgcgtacattctcccaattatcggcttttgtgttatacgtctgctgatgcttgggttgttcgtgcatcttcttgacgtaagagcttcgcaagctttcagaagcgataatgccacccgcaagcagcacttcaccacccaggatacatagtcccttcgccgtacttcctttgtacatctgtccccatcccggaacgatcaacgaacgcgccattccccgcacaccgtatttgcgggtaaaggacaggcgatcgaaccgtggagccggaacatcggccactccaaacagcacatagcaatgatagcgcccaccacccggataatacacatattcccaatactcatcatacttggtagtggtgacgtttatctcttcattctctattttgtaatggaaattatagactgatgattctttataggctccattcttttgttccatacgaatatcagtttcagcctctccgctaatcttccaggcctgctcgatataacgggaaagagcaagcaggcaatcatgccgcgctttctccaacgattcgttctctgcttcaaccagttgataatgaaaagtttcattggtggtttccggagtcttgcttaccagccataccggccgcatattctctgacttccgaagcactttctgtgccgaggcattagttatacctaacaaaaaacaggacgatgcaatgacaaccatcctcccgaacctcaaaataaattctttcatctctatatcgtttttactgactgatatatataatttcgcagccatctcaggcatcattattacactactcttacaaattgagccgaagccttaaatgaaggaaaaatagacatagagatctgcactacggcattacacggttgaccacccttcgttgccggagtccatcccttcaacagattcaccagccgcaatacttctttatcaacacgctcaacacaacgccttttatagtttgcaccggtaacagtaccgtcgcgcgtcacgataaactcaacagtagtagtaccatatcccgccgtttcaattgcaatctgaggtttatgcatattctcccgtaagaaagcatacaaagcattggttcctcccggatattttggagctgtcactacacgggcggcacgttctgcggccatttccgcctctgccgccgccactgccgctattgaatctaccatacgtatcgaatcatcataggctctgtcagtcgccacttgctgcatattatctattgtttcggttttccgttcctctttgggtatgctcaacatctcatcatgaatataaaaaccttgaaaacccgtaggagtatatcccgcaaaggcagagactatctcaaagctaaactgttgcccctttttcaccttaggaaaataatacgcgcctgccactgtcgtcttattgcctgtacttatgtaataaaaattaatgcttctacttgccgtaaagtcgtgattggctgttcccaacaccctgaacttataacctccgtttcctcgacccgtgcaaaggactccctgcacatcccaataatacttcacctcttccgatacggcaaaaggcactttcattggaaaacttttaggcggccacgaaaacttctgggcggaagctgcaactaccaataaactcatcacaaataaaacaaatagctttttcataattcgattcctttcgtaccaatattacattctataccacacactaagtaaatttgtttcatatacatcattttgttttttgttcttaatggatttcctcatttcctacttctgtttcataataagaaataacacgtctatcttccgtataagtcttcccttccgcatctttctgtataataatgaaatcacccaagagcttgcggagttctgagcaataaagctttaaaacaacccagttgtcatgctcgtcgtattcataagaatagtcaatctggcaatcccacgcttttccggaaggatattccacactatgaatcaagtattgctccatatcctctttatcattataagagacattataagtattaactattgaatcaatcttgtttttataataccgggaatccggatagtatatcttagtaaatctcttacataattccgtcataggacattctgtctggaaatgcatacgtgtgtttccatccatcatccggtatccctccggtttatcatatgtatcgaacaccaacttcttattatcacgaatacccgaaaagaagtacaatgctacttcactctcctttttacattctgtattaaccacataacaggatctatcctcaccagtatattgataagtacgggtgtaatcgtctgctctacattctatcaaccgattccattcatcataagcatagacttttgccttccacttattccttacattataaagctttgtcagtctgccttcatcatcgtattcccgcttgtattcatctccaaaacgatgacttgaatcaaaccacaagccttgagagatcaaattcccgtcttcattaaatttctgaaccatttctgcagcggacgttgttttcacttcttttaccgtcccctgcagtccaagccttaccaaatcactcggataatctacaaaatctgacatggaagattctccaacgtaaggagtagtagataaatacacatacactggtgtatattttttctcagagaacgttccggtttcattacaaccacataaaacagcagacaacataaatattatgttccccagaaatgagcatgagaagaggttctttttcatatttataatatattgattacttattaatttagctcttctaatttcccttcatcatttcttttatattctttcccattttcgcctttaaggagacttttgtctttaaagaaactgatgtctttcgcctttacatcgccaccaaaaggaccggcacctttgattatcgcatcacaatcttcctcctgagactcattgttattatcagaagattcaggcaaagtattacccgaactctcacttaccttccgaggagccaacacaaatgcaatgatagcacagacaatcatggcaactattaccactgccattgatgatatcagcaatactatccctgccgcaaagaataccggatatagcaacaatatcgcaattcgataaattccttttacagaaatagccaatataatcatctgcacaataaataataaacctacagctactaccaacaatgccattataaatccaaacagtccgtcctgatacattaatgaaggtataaaacgttctgcaagaatatcgaatagcatgtttcctgtaaccatgtggattgcaagaagtactacggcaatcacagctgcaatgacagtgggagttttactgaaataaccaaaaccctcataaagccacaacaaaatactgaacaaaccaaataagaaactccctgtgaccaaaataacggctccgtaaagtttcagaacactcatcaagcccgactcgcctaaatccaagttcccttcggtgcggaatatattgcagacaagaaacaatattaacacactcattgccaacaatacagtggcaggtaaccaaaaacgtattgctccctcaacatccagcacgttcagcagaatcaaggaagcaaccaaaagaactgccaaaacaaaaatccacatacctactttcgcaaacaatgaagaatcattagcagaaaattcttccaaaaccggtactccgtttttgttgggtaaaggtgtttccccgttcattatcagagccccgtctttccaattataactaaaatgaacttgcatcggcttatcctccggataatcgggaaaaacagccgttacggttgcctccaaagcattggaatagatcactgaagtaatcattctgtaactgatgtccacttcagagtcataaataatatacccgtaacaaggctgaccattcaatggatattcttccggagcctttatttcctgatacaaactaagtttcacatattcgcttgcaccttcattgtctacctttttccattctccaacaaacggtctaagaccagatacgtatttgaaaacatcgctcttaccataagtaatttctttcgtttgaggattataagtaagcgtatctacataaagttgcaaatcgtaagtccctaatgacaccagtcgatacttattattgcctatataggaaaccgaatctatatagtaacgatagatacgggacatagtggaaaaatccataaaaccataacttttctttccgctcggcagctcttccatctccgtatcaaaagtgcgttccgagaagtccaactccatgcagtaagtaagattatccactccatattcctgccccatcaaacttggatcctttcctacgaacatttcccaacgtcctttcagcgaaggtttctctttgctacaccccgatattccgagcaatagaaatacaacgatccctattgagagtatccactttcttcgatttaaactttgaattgcattcattccttttatcgtttaatgattaatgtacgcagatcatttcaaattcacgcgttgtacatctgcattttccttttttcacgatctattcatgctttattggagtctaaacatcaatggcatggtatactgaacactcacaggtttgcctccctgcatgccgggcttccaacgaggcataacaccaactacccgcaaagcctccttatcaagataagggttaatactacgaattacctttgcattgccgatagagccgtcgctcccgacaacaaattgcaccaccacccttccttggataccagattcccgggcaaccttcgggtatttcatattatcactcaggaaacgcatcatagcaacctccccaccggggaatgcaggcagctcctccaccttatcatatattttatcagaattatcttctgtctgcacagggacatattttatttcaaccggcttgtcctccacaatgacaagcgtttccggtggcggtggcaccgacgaattgcctgaagagaaattcctaatcccacaatcctctatgttctgtggataaaccagactaatggctttttgctcctgataagaacatttggaaaaatctttcccaaacttttcattagccaaatccccgcgcagctccttataggccgcacgaatagcagccatcactgcctgatgatcagcctcggtagtcttagcgttcctatacacggcaactttatgattcgaagtaaccattatttcatcaaaataagggatgcgcttcttctgcttttccggcagattctcatcattataaggattagcaacaaactccttcaccttttctgtcagttgcccgaggttttctatataatcgcccccagccattacctgaccagccatattaatcatcaccaacaacacattacgttcatctacttgattggctaccgcaggcgacgtagacgtttctttttctttcaaagaagcttcttctttaggaatcctcaacaattcatcatggatataaaacccgttgaagcctgccggagtatacccggagaaagcggaaacaatctcaaaactaaacttctgtccttctttcaccttaggaaaataatatgcgcctgccactgtcgtcttattacccgtacttatgtaataaaaattaatacttctacttgccgtaaagtcgtgattggctgttcccaatatcctgaacttatagcctccgtttccacgacccgtacaaagaatcccctgtacatcccaataatacttcacctcttccgacacagtaaaaggcactttcacaggataactcttaggtggccacgaaagcttctgggcagaagctgcaactaccagcaaactcattgtaagtaaaacaaataactttctcattatcatatttcttttgtacttctgttacataataagattcctgactttcatccggtctatcttaattaagatttctcatcttcttccactatcgtaagtgcttcccctcctgattcaaactcagcacataagttccctgctgatctatatctaccgagaggctccggttcgaagaatcatacaccagcgttatcttttgccgattatcatgtttcgcctgtactaccgccttcctaccttccaacgaaagaatagaatcaatctcatattcatgccagtcatcattcacccacgaagttatcttaccataatcatcatcaatatcccggttatataaactcaaggaacaatttaccagcgtcccgtcctccttttcatatttccactcacctacaaatgggtggtcagcatcagtagaaggcagtattttgtagtttgtataattaagttggacattaaatttcctctttccattactccaatctcctaggaaaaaagaaccaccattatactccccatcaaacaatttaaacgtacctgttttcttaccgttaacagtttcatcaatgatataatccacccctatcttctttcccgtcagctgtattgggttattgatatgcttataagaataactgccatagagtgaatctccaatttgcgtcaatgccatttgtacttctttgccagctacttgtccacttaaagtcatttccttaatagccggaatatcaacaggcctatcctctccttttcttataatataaacaaaagctataaccgccactaatacaactaaccctatgatgtaataaaaagaagttttccgcctaaccggaatctccgttttccgtttctcttcactaacaggcacggcaacagtagccggaatcatttctgaaggcggcaagacctctgtaccaccttccggttccccatctgtagcggtcacggtaagtacagcttcctgttgaccacgtttggtacgacttcttaacttccgattccactccttacgataagtatatagcaaccagaactcgaaaacaaaaattagaatggaaattattatagaaacaactatagtcgatttctcgctcgtaccgacgcttgaaattatcgcagctatcactacatacaatgaagaaacgatggccggacggattaaaggtaaataaactccccaaaatagtgtttgcaaaggataccatttataatatccacagaaagtgccaagagtataaacgaagaaccctatgccgaggcaaggcagaataagaggaccgaaacccatttgatatttgacactatagaagatcatgtccaccggtgcctgacctgcaacagtggatgctgcccaacataaacctatccccattgcgagagcaaacaaaccattatacaaatctaacacaaccaacacataatggtagaaaagcctggaaaaagagaatttcaatatccctatcactaaagtcagcacaggcaaaataatcaaaatcagcgaaacggcattatcactatgctccttcaaaaagccctccaatgtctttgtttcagcgatttgtccgttcaccaccacatccacaaaaggggcacaaaaaatcatgatgtaaaatacaactgataaaatgatatcaaaaataccattttccctatgtttttcattcgaatacatatcaattagctattactcgtctatatttccaacactccactcttgatagcctttatcaacatatcagatgcattcttggcttccagcttaagcatgatctgcttacggtggaactccactgtattaactgatatatataatttcgttgctatctcattactcttcaagccttcggatatgcatttcagcacttcctgttcgcgcttgctgagtacttgcggcatctcaggaggaagcttccggaggcatttccggaaatggggacagaaatatttacgtcctgacagaacagaataaatcgcctcttgcagattctccggatcggactgtttaagaatcactgcatctacatccgcctttaccatccgacggacaatccacacttcactatgcatggtttcaataataatacgcatatccggatagagcaaacgtatctgttctatcagctcaaaacccgacatgtccggcaattctatgtcgaccatgcaaatactgatatcgtgggatttaagaagttccaaagctttcgcagcactgtcagccgcatagatttcacctatttccggacagacttcaagaatgttacggatgcccgccaatacaatagggtgatcatctataagaagaagatggtatttcgatgtatccgatggaagttgcaccatatttcttttatttatatgcttgtggtcagatattagtcttccctgttatcatgtttactattttgtgcaaaggaaaggtatttttaatttaaatctactatcattttccgtagtttttcaatagacagttggtaaatactatggtatactttccgtacatgaaaactagtacagaataaatctttatttaaaaggagccgtaactgtaacgcatacaccggtctcatcagcagccacatggagtgtaccattcatacatctgaccctatcttccatcgtgcgcatcccgatgcccttggaagaagagcgcttcataactccattgctgaatatctccaaccgcacatgcgcaccatccatcaacagtgaaatggaaatctgtgtgccggaagaatatttgagaatattattcatgctttcctgtacaatacgatacaattcatatgccacattataggataccagactccaatcggacgtagaagcatcgaatgaaagatgcatggatgaaggaacattcagatgatcgatataatctgttataatctcatcaatagtggcatcagaaaatacgggaggcattagttcgtgcgaaatactacggatattcgcacgactccgccctagtttgtccagcaactcacatttgtcctcttctctattaaagcccgatttaagttccatttccaaccccagaagttcattgcacaccccatcgtgcagttcgcgtgccaaacgggcacgttcgctctccattccgtcaatatatttacggctgagttgtaacttgcgtttatacaagagaatgatcaagaggataagcataaagctgataaaagctataaaccaaattgtgagccgaagactgcgaagttcttcctgctgttgtaattctttcagacgcttaatttcaagttctttcttctgagtatcatagcgcacttgcagctcgctcatttgcttctccacctcctgtgcagccagggaatcacgcaattcgagagcctgctccatatatctgtaagcctcatcaggctgttgcaggttatgatagcattcggccatacggctgtaccacacgtagggagcggtaggcgaatttgtacttatcaatcccgtcaactttcgatagaaatccaaactttcccgatatttcttttcctttagtaagagctgggcttttgtctcataaataccgacagcttcatggctcgtttctggtaattcatccagaaagcggtcacatacattcagatagtaacgcaccgaatcatcttgtgctgtagcctgaaaagcgggtaacagcgctgacaatacttttaaccggaaacgtggtgattgttgctgggaagctattccataagccttatgcagataattgatcgcttgatcgtattcccctgtctttaccaacagagaaccgcagatgtagtaagcctgcaaccagtccaaagcatcttcctctttcagggcatacgtaatggcttctcgtgcatgtcccttcgcgttttctaactgtttgaaagagatatacatcacggcaatattggcatgcagattagatacagcactataatccttgcttttcatagctgcctcaagtcccttgccgtaatagtaaagagcagagtccggaaggtttattctgcgataggcgacacccagcgaactgcaattggtcagataggcttcactatcaccggatttagaggtggcatccaaagctgtcagatattgtgatgttgcttcccggatatccccctcaatcatataacagcttgccaaatcagtaagtaaccttccacggatactgtcaagcactgtattctcttcacaatatttcagtccttccagtaaataaggccttgccgaatcggtctgagctattccattgtaggattgccccaacgacaaacaggtgatagctgccttttcgttttctccactctcacgatatagttctaaagcttttgtcagtttataggtacaactatctatttcttcattttcataatgtgcacaagcttcctcgtaaagactatcggcttcactgttcatttgcagatccaaggtggcaggtctcgtacaccctgccagaacaaacatcaataaaactagtaatttcatcttcatcacaatttaccatacactataaactcccattcaacatgatgatgctatatggaatttcatcttccagtcaactgaaattgtgacaaagttaagagtcttcatttaaaatgaaaattatccggtatatttttatccggcatttttaccacatatcatttattttcaatcttactaatcactattttagatctactgatcctttacctgttggcagaattgatttatttcgatacagtaatgaagtttcaccacagagtaacacagagtttcacggagtcctattttctgatttcaaatcaattaaactctgtgagactctgtgttactctgtggtgaactaattcatatcccagcggagaggagcgaacagatgtttcatatacgtcgtaacttactgtataacaacacacttgatgttccaccatgatcagtcgcagtggaacaccagttcagtcctagtgggaagtaccttcagtcctagtgggaagtaccctcagtcctagtgggaaggcgacacactgattacttatccggacttttgcggcgcaaatgacgaaagtgtggccaacattgtatgtctgccgcttaccgcttcatgaactctttccgttcttcttccggaaatttctctatcgcatagcgcaacattgtgcgaggcatcactttacaatgcttttcaaggaactgcaccagtaggtctttattccgttttcccatttcccgcaacatccatcccacggccttctgcatcaggtcgtaacgcgtacaaaggaaatgctcggaaagagctaaaatatcgatgaaatcatcgtttttaatcaacgcataagtggaaaccaccgctatgcgctgatcccaaagcagttcatttccggccaagcgatagagaacatcacgaggcttatccttgagatattcgcccacaatacccggagcagataagtctaccaaatcccagttattaatacgggaagtctgcgacaaatagaagtcgaatatctcttttttacccttttcatcgcactttttaaagcgttccaccagcatcagcaaggcacacaggcgacattcatgccattcgctttgcagcaactccgccattacctcaaatggcacatccttatgccgcttcgccactatacgggtgttgggaacgacaataccgagaaacttgtcaccttctccgtattgccctttcccagttttaaagaaattgggaagatactcccgtttcaccgggtcaatgtactgttccagttctcgctgtatttcctttgttatctgcataattttgttgcaatataattcctattcgaggcataactccggataacatcaagaaagccgcaatttatgcttattcatttgataacatctataattaagatgtgccaaatataaagcttttcgcacaaatgattcatctctacagggagatttttatatatctactaataccttttacagacccggccaatacttttaatagaagtttgaaggcatcatatcccataccgtcacactcttaaatctagcacttccaccctctccaaataaagaaatattcttctcgttcgattccgaaaaaaatgcattggtacgcaccaaagcctgcctttcattggcatatacttcgacaatacacttgtctattagaatatccaatacaagcttttcacctttttgcaattcgaatggcgcttcctcaacctttttaaactctactccaagcggtgtgacaggtgccatcccaatggcattcagacgtgacatatcaagcacgagtttcttaccggaaacatcataatagatttcaccatattcctttccatcctgactctcaagtattcttacaccacatttggttgcttccctaggatctatttccaccacgatctctttgacatcaccagtggcaccgaccagcggggtcactttcgatatattttgtgcagcatatgatttctcgttataacgcaaagagcgcagctcactgacaggacgcatcccaagtgtatgatcctttctcatgaacagctcacggggaaggctcatcatgccactccaaccacttttttgtacaacctcctgatttctggcatcgaatagccacgcccacatcaccctacgcccgtcaggagtcaacaaggactccggtgcaaaaaacgtgttatcagcaaatgacatacaggcatgattctccggataaaacttttcatccttccatgtgccaacgtaataacggcaacccaaatgatggctgatacataataatactttctttccacccaaagtgaaaaagtcgggacaagaaacatcttcactctttgaaacatccggcagatatgtaccaaacaaatcaccgacatagctccactcattcaattctgcagccttaaacacagccggacgttttccgccgaaaatcgcataatatgtatctccttctacccaaccatgaggatcccatgaagcatacggtgcaccaccttcggagtctctgtccgtctcattggcaatagcaggacgatctttcggatcgggcacaaccggattggaaggcaactgcctccactggttcaatagcggatcactgctcaacgaaatgctattcccctgccctacaccatgataaagcatcgtagcctctcctttcttattcacaaaacagttaccgctaaaaataccttctatctttgattcatgagtcggatacaaagccttgggatgttctctccaatgtatcatatccaaactggataaatgggcaaaaacatgcacaccacgatcctggaagatatgaaacatatgatagcgtcctccccaatatatacacccgttaggatcagaagggacagcgtaatcttccggaatagcaaaatgatagaccggacgatatgggtctgccagcagtttattccgaaactcccggatagcagccacatcgtatcccgaagggaaattattttgttggccataagaagacaaacaaaacaatatgctcaaaacagataaaactgaaattttcttcatataagtatgtttttagttcatagaatcttattcttccaacctgaataatttcaggttcaatacatccaaagtcccgtcattggcaaatacgcccggcaaataattgcccgaactatgcaaactggaattaaaaaccagttcatcgttgatataaagttcaatcgtattccccatcagaagcatacgaaaatcatatttcctcctttcttcaaaaatataggaacggcaattctgaaaatcccaggtatggtcggtcagatagacccgatctttcttcggctcaatcaccaggatatgagacaaatcgctcaaagacacctccgcaacaggtctggcgagtacgattccgaaagaagaacactggaaatcctctatggtaaatgagatttccatattggcggaaacaccttcgaatatagctgcctgccaactgtctttatctgttttgcatgaaaacactccctctttttctttccagagaccaccgtatgtaggccagccgaaactattggcaggctgatcatatattaccggagaaatctcctgaatacgaagtttaggcagcaaatcagaggcatacaaggctctcaattttccttgattgttcagccctatattcttaggcaatgacaaaacggaaacaccattgtctacatcaacatacatcaatctccgctctccctgataatcgacagtacgcatgctataaccactgctcaactgtccgcctatcaaaacattgtccttcatatcctccataaacggtccttggggcgaaacagcagtggcatagatagttccacgggtaatgtacggatcggaaaatgcagtcagactaccattatccttagcggtagtcagagtcatgtaccaaacgccttcgtgctcaaagacatcaatcatctccggcatactgactcctgtcgggtaatatacaattccgcgttgctcccaatggagcagatcggtggaatatgccaaaccgataacagccgtaggagatgtcaatccagacatatcggaagaagaaacaaagtaaccgtaaaagcctcctccggacttatccttaaccaccaccatatcccggcagtccactcgatcccagtttgcatagctgctgcccgttgatgaattactggagaaagttataaaccaacgtccgtcaggcacaatgacaggatttccttcatattctttccaagtatacaggtcgtctgatagagccacccctatgcgttgccccgcccactttcgcatggtgtagaaagtgtaatattgcccttggtgttctaccgtgcatccggtatagcgaaaatcagcctcattatccagactcttgtcatatagagagagtacttccggcttttcattccaatgcaacaaatcaccggaagcagcatgcccaaatccgcgcaaattagtatcacgagaataagaaacaccattcactataccctgaagatggaaaagatgaattgagtcttcctttacaatataccaattatcccacatcatatagttatatggccggtacttcactttattcaccacccgcagtcccgcttccgggtcaggttccgggtcaggattttctatcggatttcctttggttactatattatcatctccacatgataccaacagggagccccctgccagtaatatgtaccatattaacagattctttatgtacttcatatagtttttatcttattcataagattcgttcggatcataacgttatactccctttcagcggtaaacattcagaggaggtccctacaagtatttcaaagtctcctttttctactacgaaacgctgtttgtccatatcgtaataagaaaaggcatcatcttccaactctatggtgacacgtttggtttctcctttcttcagaaagactttttcatatcctttcaactctttatacggacgtggaacagacgacttcacatcatgcacatacacttgggcaacttccgccgcatccattttccccgtattacttatgtcaaacgttacttttacccggttcaccccattcttttcaaccattagattaccataggcaaaagtggtatatgacaacccgtaaccaaacgggtacaggggttttatacccgatttatcatatccccgatatcccataaagataccttccgaatattgtgtacgtttgtattcggcaaacttcatgttttcataatagctctttgaaaccggattatcttcccaacgatgttctattgaaatgggtagcttcccacttggcgagatgacaccggtcagaatctcagccactgcacgcccgccttcctgtccggaataccaagccatcacaatcgctttcactttatcaccccaatcggaaaaatcaataccaccaccggcatttaccacaaccacaacgttatcatgtaaggaagttaccttacgaatcagctccagccgaggtttgggtaaggcaaaagaacgatcggctccttctccctcgataccaccatcttcatcaccattgttaaagccgacacaaagcactacattttttgctttagccaatgtctgctttaacagactttcattcaatattccagctttcaaaccaatacgggcatctccaccataattatgatattctacacgcaaccgatattttttacctgcctccacttctatcacctgttcacgttccggcagatgatcagtgcaaatcagctgatcattgatataagccctatagccacctctcccacacatcgtcatgcgcacaaggccattggttaccggaacatacgttgcagtccagcgcacagaaaagccgtcggccggaaatccctccaatggcacaccggttccccaatcatgggcaatctgattttccatacaagtcgcatcaggagtacctttcaattctacattcttgaaatattctgccttgaatcctttttgccgcttaccctcatctgcataaattgcatccttcaaatcatcaaatagcaaatcatccttcagccggattgtattccgcttttgtaactgctccagtccttcggcaatagaaacggtagaaaaaggagatacaaagccgcttccaccaccagttaccagcacttctgcattagatcccatcacaactgtcctacctttcagaggtaacatgttcccttcatttttcaataatacaattccttcacgggcaatatccaaagcagtctgacgcgaatggggattgtccaaagctatagaagtatctttaggttccttatctaaaaagccaaaagctatcagggtctgcaaaatatgctgtactttcaaatcaatagtggcttctgttatcaacccctgttctatagctggcatcagaagttcttcattcagatactcccccgtaggcatttccaaatccaaaccatgattagctgcccctactgtagaatacacagaaacccaatccgacatcaagattcctttaaatccccatgtatctctcagtatatcaatattcagccagcgattttcgcttgcatgtaccccattcagtaaattataactattcatcacagctcctacatgggcctctttcactgctttccgaaaaggtgcaaaataaacttcctgcaaagtacgctcatctacttccgaactgacatggtggcgatcccactcctgattattagctgcaaaatgcttgattgtagcaatcacaccttccgattgtactcctaatatgtactgtttggcaacttcacccgataaataagggtcctcaccaaaatattcaaaattgcgcccacacaacggagaacgatagatattcacccccggtcctagcagaatgcctacacctcttgccttggcatcttgtcccaatcctctaccaagcctgtagttcaaatcacgattccaagtggcagcagacaaaataccggatggatacatcgtactttttgtattgttacggataccctgtggaccgtctgccataaatacctccggcaatcccagacggggaaccgggcagattgaaaatccgcccgtatagcccgatatataccgtagtttctcttttaaagtcattttcgcaacgatctcttttgcacgttgctccgcctcggaagtgataacaacctgggcgttcagaatgcctattccgcataacaggattcctataataaaacaccttcttatattcatcttcaatctctatttaaattattcaaagtatcatactacttatcccaacccggactctgaaccagattcggattattatccatatctccctgaggaatagggaaccagtagaacttcttatcaaaaacacggttctgataggatgaacgcttataaaaatcctgcgtagtagtggcctgcctgttcataccgtagaatttagtattcaacgtcttctcaccaatcatccagcgacgaatatcattgtgacggatttctgtttcacaacacaactccacgcgacgttcacggcggataatatcacgcatttcttcctgcgtaccgggagcgggaatcattccttgtccattcccgtattgcggaatgcccgcccgttcacgaatcagatttagatatgtcaggatatcaggattatcaggatctgactcattcagagcttctgcatagttcagataagcttcgccgagacggtaaaggatggaaggatagtaattccattgctcaatgacaggattattttccggatgaatcagtttacgcatcagataacaggactcgggacagtcaggattgttattctcaggctgaccagaaagaaagttcaacggtctttccaacctgttataccaacagccgttgtacaaaacggaaacatagaagcggggctcacgttgacaatacattttgtatgtacctgcattcgtaatcatgccatgattgttctccacatcattattccagcatccttcggtccagtttgtcgtacgaaactcaggaatagtagaaaaaccagattcactataaccactttgagcgttgataatgggacgccccacatcattgttctcataccccagaataggtgggagtccattactcataaagaaagcatcaaccaacgattggctaactcccagtccgctgccacggcccacaccacggggtgctgccagaaatggaatagcccaatatgcccagttgggacgggcaaataagatttccttgtttccttgcgattcctttttccacatcatattctggtaagacaagaatggatctatctctccgttgatgtattccttataaagtcctcttcctgcagaatgggcggcatcaatcaattctttagcagcctttgcagcacgcgtccatttggaagcatcatacgtactgttgaaaagctcaactccatctttatttacatgccctttatactccgcatttccattcactaacggactggcagcaaataacaagagacgggagcggacagcaagacacatcaaggaagtagcacggccaaatttctcagcctgaggatagacagccggtaagcccttggatacttccagcaactcattatctatccaattaacaatttcgtcgaacggagtctgtgtagccaacaattcattggtaggtgtatcaagcggccacaacttatcaggattaaaaggtacaggaccatatttctcaaccagtaatgtataataataagctatcagaaaacgagcctccagtttcatatattccacttcctgacttgtcaataactgggcttcattaggcttcacgttttgaatgaaaatcagagaagaacgaatgcgtttcggcaatacactccaataatcacggtcgacagtacttgcaggattccaatttccggattgaaaatagatacaaggccatccccactgcgcccatatcgtattcggagttacatcatccgccattattccctcctgatggataaacctctcatgatcagggatactagaataacatccggccagccattcttccgtattaaccttattcccaaaaaccatatccaacgtctccatatcatccggagacttatccagaaaatcggtacaagaagccaacagtaaagctcccagtaagaaaatatatttgaatgttttcatatcattatcattttatatttattgcttcttagaaagagacatttaaaccaagtgatacagacttcgtgataggataacactgtccgttcggagtatccaactcggggtcccacattttaaactttgaaaattgcagcagattagatccggcaatgaagatacgcgcactttgaataaagttcggtaacagcgtctttttagagaagctatatcctacctcgatatttttcaaccgcaacatgctcatattacgcagccaccaagtggatgactgtgcattattcttgttttccatacgcgaaagacgaggccaaaatacattctgacttggattttcgggagtccaccgatcattgtaattggagtaaatagccccccaaccgtcaccgcttcccggaataaaagcattcttaccagcaccaatcacacggtaagtctcgccattaccctgaaagaaaaagccaagatcaaattgccggtacttcacagtcgcaccaaaaccatacaccaattgaggatctattgtaccaccgatagccgtttcatcaaaactatctacaacgccatcatcattaaggtctttatatttgatatcgcctgggcgtaccggtccgaaggtatgcctaggaagtccctccttcagcgaaccatctgccttgaaatcatcttctgtaaacaacccatcgtctacaagtccgaacaattgattgatacggtgtcctgtgcgggcacgatttgttcctactacagaaagcggttcatccatttcccttattttactttgtgcataagtaaaagttccctgtaacatgatagtccagtccttgcccaattgcttattaaaggccagtgacaaatcaacaccttgattgctcgcctcaccatagttggcaaaaggtacttgaataaatcccgcggtagaaggtatagtctgacgttgcaggaaaatatcataacggagatcatagaaataatcgacagacaaatctaaagcattccatagccccaaatcgataccgacattgagtttctttactttttcccaagtcagaagaggagaaccggccaatccctcttgtttaccatttgcataaccatagttgttatcaacaccccagtagtaaccatccgtcacatcaattgtagtcagataaggaaaacggatgtccctgcggttctgaccgagacaatcattaccgaccaatccataagagccgcgaagtttcaaagtagaaagagtattcttatagcgttccataaagggttcttctgatatcacccagcccagagctactgaagggaagaatccgaagcgatgtccactggcaaagttctcagaaccgttatagccaaaattgacttcacctacataacgactgtcatacgtataagacgcacgtcctgctatgccttgaaaacggaatggcagtttctcgccttcatcaaggctacgctggttatacataaacattgcactaatggcatgcttgccgaatgtctggtcataattgattgaaccttcaagatagacactcttcgttccaaactcggcctctttcatgtaatcaagatagggcttaccataactctgaatagtaagattaagcgtgccgtccggattacgtctggtggctgctgcatcgtagtaattcggttccttggtacgaagcacagagttagcggaataactatcgaatgagaaaactcctttcacctttaatcccggcaacaggaactttaagtcttgttcaacagagaacaaagactctatcttggtagtattggtatttttatatccattttgcgtcgttacagcccatggattattatgttggccatgtttgggaatctcaccagtggagtaacgtgtaggatgtacataagggggagtaaaaaaagcatcttcatacaatttcggagctctgtccggtgcacttgttccttcctgtaaatacccgccgatgctaacacgtaacagagtggttggtgtcacattcacatccacattcgagcgtaagttataacggcgtagcctagtagatgaatcccactcctgacgtgaatcattctcaagaagtcccttctccgaataaactgaagcaaccaacgaataacgaagaatctcactaccaccacttacttcgaggttagcacgtgtgttatgccccatatctttcataattgcatctatccagtctacatccggatagaggtcagggtcttcacccgtacgatatttctcaatatccttataaggtgccggtaaaccttcgtcagcatacagttcgttcatcaggctcagatagtcatacgaaccgattaacttaggtgtttttcccaacatggtaacggcctgctcaaaacgtacattcactgaaggctttcctattttaccacgcttcgtattgatcaggataacaccattcgcaccgcggacaccatatactgcgctggcagatgcatctttcagtatggaaaatgactctatttcagcaggatcaatattattcagatctcgttcgatgccatcaacaagaaccaagggattattgcttcctttgaaagacgagatacctcggataaagaaagtggaattatcataccccggttccccagtacgttgcgccccaatgactcctgccagttgtcctattaagttagtactcatggaacgacttgtacctacctgtaatttccttggctcgatagtagtaacggcacccaccacagaaactttcttctgcttgccaaaacctaccaccaccacctcgtctaatgtctttgcatcttctttcagtgccacattgacattcaactgattcccaacagtgatttcttgtgactcgaaacctatatactggaatacaagtacggatttcttatccggaacagtaataaaatagtttccgtccacatcagtaacagtacccgatgttgttccctttatgacgatattcactcccggtaatggttcacgctgcgtatcccgtacggtaccatttatcgcaattcctttcttttgctgagtaacttccgttacaccggcattgtcaaatgtatgtgcttccatagtcgatatcgatttagtatagtcatcctcagctgcaagaggaaaactcactaaacccagtaaaccgacaaagcatactcgctgtaaattaataatcagtgctttcttgtacatgattagattgatttgattaacattaatagtatacatctctcttgtatatgcttatatcaaagcataaaatatttgaaatcgtttctgtttcttcttgatcattgcataggcactacatcttttaaaagttaaacttatttctatcaattcatagattctcacttaattcttccaatgacttgcctttcgtttcgggaaaatatagccaggccaccagcatctgcaacagcatcataatggagaaaaatccgaaagtgaaagcaagtccgctccccccattttccgctatcaccggaaaacagaatgttatcagggccgcgaaaagccaatgggtcaaactgcccaacgattgtcctttgctccgcactgagttaggaaagacctcagctatcagtacccagattacagcaccggtagacataccgaagaaagcgatataaaataagattgaaactaacagaggaatgccacccagatcgaagacaaagaatatgtaggaagcaatgcccaaacacaccgccatacctattgaaccaaacataagcaatttacgccgaccagctttatctatcagcaggaaacccataaatgtaaagaccagattcacgatgccaatagctacagattgtagcaaagaatcttccgacgataaaccactttgctcaaatattctcggtgcataatacaagatagcattaattccggaaaattgattaaacatagcaaccagaaaagcaacaatgatagctttcttattatttttagtgaaaagagcacctttttgggtaatattcttcctaatctgttgctgtatagacccgactacttgctctacctgcgtatcatcaatctgcatcaatatctctttggcctgaactatcctattcttcattaccaggaagcgaggactttcgggaacaaaaaacaataggatgaaatagattaaagcaggaactccctcaatacccagcatgatacgccatgaataatccgacaaatcatatagcaggtagttggaaacataagccatcagtataccgaatatcacattgatctgaaaaatagcagtcatctgtcctctcactttagccggagccacttctgatatatacataggtgctaccaccgatgaagcacccacacccaacccgccaataaagcggaaaaagattaaagaacctgcatcaaacgaaaaagcacatcctacagcagaaagtagataaaccgatgctataatcagtaacatgggacgccttccatatttatctacaggcttactaatccctaaagccccgataaccgtcccgattagggcagaagaaatagtaaatccatgttctacagaggttaaactgaatatagactgaatgatcttttctacaccggaaataaccgctgtatcaaacccgaaaaggaaaccgcctaaagagacaattaccgaccaacttaatatacgaaaatagtttttcatggtatccatttattttatgataataatgaagaggaaatcgctgcacaaatatacccgccagtagtaaatatgagtatcaatattgtttcgtatactatcaccatttcagttccgaaacatccattatagtaaatgaaacatgccacttcggatcaggtacaaatattcctttttcaagttatcacttataaagaatcttcattcttcaatgccatacgtttaagaaatgcagtaggcaattccttatagaactcacgataacatttagtgaaataggctggtgatgagaaccctacccggtatgcaacctctgcaacagcaagatctgttgtagacaatagttttttagctttttgcaaacgatacaccctaagcagttcattgggcgaatagccggtctgttcttttattcttcggtaaagttgtacgcgagacaagcctatagactgcccgaaagcctctaccttaaaaccactatcggctatatgactatccatcaaagcatatatcttttctatgaacagacgcccttccagttttgccccgtcatcgggtgcaggatctgtatcattcaaaatagcttttgcatccttcctgcttttaatcaaattcttgacgtaagctagtaaaagagacgaatcgaagggtttctcaaaataaatatccgctccgcaatcaatgccttttatcttctggctgctcaatgtcaaagctgacaataaaatgacaggaatatgacgcgttatcgattcaccttttaagcgccggcaaagttcaaagccgtccatcataggcatcactacatctgcaatcaccaggtcaggcaaatactgagaagccagtttaagtccatactgaccattcttcgccagcaaaacaatatattctgtttgcagcaggttacaaatgaaattcagtatatccagattatcatccaccaccaagatgacaggtttatttctctcattcaaaagaagtgtttgattgccaaggtctatgttatccccttcttcatcatcgcttttagtttccaacgagaaagtctgtccttctatggttgcattgagataaggtagaataacataaaactccgatcctttacctacttcactttttacccggatatcccctccatgaagttctgcaaaagcttttgcaacagccagaccgataccagaacctgatgaatagttatcgactttgaaaaagcggtcgaatatgttctctatatattcaggatcaattccgaccccggtatcggagattttaatgacagccttcttctcattttcgtcccattcattatacaaatccactcgtatggttcctccctgatttgtaaattcaagagcattcgacaatagattgtaaaacaggcgttctatcttattgtaatcaagaggcatttcaaaattcgcagcatcttctgttgcatgaatacagaatttgatgctcttccgcttaatggcaggacaaaaagccttactccatccttcgatacaatctttcagattcgcttgtgatagattcagtgccagctttccattctcatatttcctaaaatcaagaagttgcttaaccaagcgatgaaggataatagcattccgttttaccattaccaacaggtcatattgatcatgcttcatctgatgattctgcaacaacagttcgactggctctataataagtgtcaggggagtcagaaagtcatgtgaaatggtagtgtaaaagtgcaatttcgattgtgtggcttcttctatttgtttcctctgcaactcaagttgctcattcttatcttcaatatccttattcttttgagataattcattgttatgttgtttattcttcctgaatgcattcatcagcagataaagaaatagcagtaacaaaatcaaaataatgacagaacaatataacagcacctgctggcgtgcatacaacgagatattcttattaatgtctttattcagtgaaaatatcttatcgctttgcccattcatatatcttgcctggagcttcaatattctggcattcgtatgatccacctgagtagtaggcaggattgtctcccgttcaaacggcttattttgcaggatattcatggccagctccattatcttatcccctcctgtagcattcacaaacgaagctgctaaaactccatccaatatcatgtcaacaccgtatccatcttcagcaagtccatcgatacccacaaaggtgatctctttctctcttcccttcgctttcacaactttatatgcccccttagccatccgatcattgtgagcaaacaccagatctatttccggattcagcagcaatgcctcttccattttcttttctccaatgctttccaggaaaataccactctccgaataaataacctctatatccttatatttattgacgacggacataaacccctcatgtctttcaattgtaggagaagcaccttctgtacccttaatctcaacaatcttgccttttcctttcaggtatttcactataaattcacctgccaaagctcctatttcataattatcagggccgatatatgcagtgaacttatctgaacgtatcttcctgtcgctgataataatgggaatattacttttgtatgccatctcaacagcaggagtaacaggtgcagattcattaggagagataatcatgagatccacctttttctttatgagataagctatatcttcagcctgtttagcattattgtcattagcagagcagaagataacatctatattccccctaaacatcgcttccagaaagatttctttattcaacttgtcacgccactcgtcatcactgcattgtgatactcctatcaaatatcttttctcctcactttgctgacaagaaaaagatatcagcatcaaaaatgatattcctatcaataatgatactctccttaatttacatttaattcctatcatcatgttcttcatgtatattgattcaataatcgcaaacataatgatttaaacagaagttcaatataacagatgattcatataatatcatttatcaaggtttcagagaaggaaaaaacaacaatatcctatcatgttgacacaaatataggattctgataaagtattgatatattgcaaaatcttaaaggaatataaaaatccggatactgataattcatactaatcaaccgggaagtggtgaaaagtatcagaaaataggaatgacagtacgcttactggtagctaaaatgaaaataatatagatgtatccacctatttccagtttattcttcacatcgacacacagaaaataacacgggtaccttgagtgtaccctttatcaatcctcaggtagccacccagcctttccgcaacaatacgacaaatggacaaaccgagccctgctccctgactaaagttatccaacttcacaaagcgctcaaaaacacgttcctgttcctcaacgggaataccgattccggtatctgtaaccgtgaaaatcaattgattctcttctttcttaacctcataggctaatgtaacggaaccctcatgagtgaacttcgatgcattgcccaacaggttatcaagtacctgcactatataattataattactgtttatgatcagatcgtcacaggcaggttcaaaaatgagctttacgcccggatcgaaagatgcccccgccgcatctatcgaagcctggcaacaggcattgacatcaacagcattatgcttgatttcaacctcactgtcgagaatggaaatatcaaggatatcacctaccaacttcagcaatagcttgctgttactctcaatcaatgcaacatattgcccgatgtcttccttttcatcaagcatatcaaccaataccccggagaacccgacaatagagttaagcggagtacggatttcatgggacatattctgaatgaacatagttttcaaccaattgctctgttcagcaacttccttggctttgcgcagttcctcctcggctttgattaatgtacgattctgctcatccagcttattttttgcccgatgcaactttgcattgagttttctctgttgccacaaaaagataacgacgatacataaaagacctagtacagagaataaaatgatccgggtattttgcagttgtttcttctgagagatcttttccaaccgtaccttctcagcattgagctgttgcaagttcaacatggtagcaaactcactggtagtgatttcttcattcctttctttctccttcttctgttccaacaggaaatcgcggtagagcccggctgcttcttctttacggttcatatcccaaagaatatccgcctttgtttttctcaatgccatcaaagttgtcagattgtttttcttcctcaattcggtttcccgttcatccaatacactaagagccttattatagttgcccaccctccagttataatcaatctctacatcatacaaatagtgtatatgacgcttcattgaaggttcttccatatacatttgtctacactcctccaatgccttgcgggcagctgccgtatctccttgcgcaagatagagtgatacataaaccagcttggccgtcacttcatgataagtagacttagaagttttgagtgcctttttaagcaattcgggagctttttctgcttcgcccagatcaatgtatatctttgcgacatcactatactggcaggatatattatatctaaaaacattggcattctcaaaaatatcaatctctttaagcataaactcctgagattttttcactaaccctttagctgcatacacattggctaacgcgtaataacattcagcaatactcccctgctttttctcacctttagcctcctgcaacatcttttcggcttcaagaagagcaatgttatattctccttgcgtaatataatagttaaccaacctggcagcccacgcccagtagtaaagttcagcattaccgacacttctggcgtattgttttaagcgatttactccggctatgatgctatccgtgcggttctcgccctgtccgtaatagtaatagtctaccttggctcccaaagctatcttagccatcaccgtatcgttgcacctgattgccatatcaaacaatgtatccgatgctgtcagaacaatgggatcagtcggatcattaaaatactgtttatagtaagcacgcatgcttttaacatcgatagagtctatcttttgagatgaaatagttcctacaaccaaatggaaaagaacacaggcaagaatcgtttttttcagcataagttatttgtctgttgtatattatatgatgataaagatatattttatctatgaaataaagcatcccgctatctcacaagacagaccaattgatgatttttacctttttattgcatataataagcattatttagaataacaacagccaataagtaagcaaacgttcgtcttcacagtatctatcgccaagtggcatcaaaaagagctccgcttattatcaataatttacaattgacaataagcggagccgccatacaaccagacgcactgattatttctgcgtcacccctttccaatcatccgtacggaaaggtgaagccgggagtccggcaccattatataagttacaaaccgggttgttggcccatgcgtagcgcacggcaacgggatacgacacttcgggagaactcaccacaatcttatcaccctgtatttctgccttcgcccaatggaatttatgatcacgaccggcaatggcaaagccttgcaatgctttcccatcactactctttaagccaccatctgtatgatcaaaagaaaggacaatcttatctccgtccacctgataggaacgataaacgggaccggaataaggtatttgttctccatacgtattagcacgggctaccaacgccaagcgatgtccaacggcctgtttatctttcgggtggatgtcattggcatcgcctttatcgatgattacagccattccggtattcgctaccgacaatgtgcgcgcttgtgcttcgcggagttccgcccagtcagaatcaacagggttgggagacacttgcatgaagttagctaactgtacaaaatagaaaggaaaatcctgtccccagtccttacgccaattctcgataaccagcgggaaaagttcacgatactgataggcacgggaagcattgttttccccctggtaccagatagcaccacggatactgtaaggcaccaatggatggatcatagcattgtataaagatgtcggcagattggggtcctcggacatatccttcggaaacataccctctttccgggcatcggccgctatctgatatttccattcaccggccagactaatttgttctccattgtctgaacggagataaagttcatccggcataccacaaccaccacctgtatctgtcacacggatagccaatgtaagcggtcctgctttcaccaacttacccggaacggtgtaattgcgttgaacagaataaccatcggtacggcccactttccgaccattccaatacgttatatcattatcatcaatagcccctaaaactaactgcactttcttacctgcccaggatgcaggaatatcaacagtgcggcgaagccagattagtccgtcaaaatcaccaagcccttgctgatccaccattccggggaagttcagcttgccccaagccttatcgtccaaagaaacctcagcccgtaccggtttcccggcagcaaagccttcatcaacacgattgttccaagcatccaaagctttcaaatagtccgctttcatcgcagctttatcaggcattgcacgaatatcttccactactttactgaagtccggcatttcttgcaacacctttccgcttatccaggattctacattggtccctccccaggaagtatgaatcaacccgacgggtacattctgtttttcagagatttcgcgaccaaagaaataggcggtagccgagaattcaggaacggtcaagggtgagcatacctgccagccattatcacggattttgatatccgtctccggctgcgtactggtaacatgttccacatgcaataaacgaatattgggatgattggctgcggctatttctttctcataatccagaaccttgccccaacctttcagcggcatttccatattggattgtccggaacagatccatacctccccaatcattacgttcttcaacaccagtttctgaccatcggtcagtgtaagctcatacgggccacccgcttcaggagtacgaacggaaagcttccatcgcccttccttatcagccagtgtttcatacgtcttcccatcccaggaagtggttacttttaccgctttcatcggttttgcctcaccccatataggggcatccgcctgttgctgcaacaccatgttatccgaaaacatcggcggcaacacaaccttggccgagattgtaccggataacaacagcaaagctgcaattaacatacatttgtttttcatatcagttaattattttatgagagtccggagttagtaacctctttaactccttctccctctaattccgtcgcaatatcagaaagcaaagatagccagaatttcatattcgaaatagtgttattgccctaataaatgcaataatctttccatttatcacgctaaatagaaagatattcctacttttgcacgaaaatcaacgcgttattttatgattttaaattacatttgggtagcattcttcgtaattgctttcattgtggcactcatcaagctcctgtttatgggcaacacagaaatctttacggagcttgtcaattcaacattcacttcctcgaaaacagccttcgaaatatcgctgggcctgacgggtatcctttctctatggctgggcattatgaagatcggcgagcaaagcggcatgattaacgcattatcccgctggctgagtccggtgttctgccgtcttttccccgaaatccccaaaggccaccctgccatgggttctatctttatgaacctctccgccaatatgttgggactggacaatgccgctacaccaatgggattgaaagctatgaaggagctgcaagaattgaaccctcagaaggatacggcaaccaatccgatggtcatgtttctggtgctcaatacttccgggctgatcctgattcctatcagcatcatgatgtatcgcgctcagatgggcgctgcacagcctaccgatatattcattcccatactgatcacatcagccgtttccacccttgtaggagtgattgctgtcagcattgctcaacgcatcaatctgatcaataagcccatccttatcctcatcggttgcatcagccttttctttgctggacttatttacttgtttatgcaactcggtcgtgaagaaatcggtacatattccacattgattgccaacgttatcctgttcagtatcattcttttgttcattatctggggattatggaagaaaatcaatgtatatgatgccttcgtagaaggtgccaaagaaggctttaccacggccgtgcgcatcattccatatctggtagcgtttctggtgggtattgccgtattccgcacttccggtgcgatggatatgttagtaagcggcatcggttacatagtaggattgtttggcgcagataccagttttgtaggcgccctaccaaccgcattgatgaaatcgttgagtggcagcggtgccaacggattgatgattgataccatgaaggaatatggtgcagattcttttgtaggacgaatgagttgcgtagcccgtggtgcttcggacaccactttctatatcctggctgtttacttcggaagcgtgggtattactaaaacgcgtaatgccgtcacctgcggactgatagcggactttgcaggtatcatcgccgccatcatcatcagctatctgtttttcttttaacttttaattattaattgatatgatttcctatcaaacagacggtgtagaaatgcccgccatcaaaaaaagccaaaccacagaatggattaaagccgttgctgccacttacaagaaaagagtcggtgaaatcgcctatattttctgttctgacgagaaaatacttgaggtaaaccgccagtatctgcaacatgattactacacggatatcatcacttttgattattgcgagggcaatcgcctcagtggagatttatttatcagcctcgacacggtacgtacaaatgcagagcagttcggcagttactatgaaacggagttacaccgggttattatccacggcattctgcatctttgcggtattaatgataaaggaccgggagaacgggagattatggaggcagcagagaataaagcgctggctatgcgatgaagaaacgaaagaaagtagctgtttagagcatctatagatgggatgcgcaggatatatagatgggacacgcaggacatatagatcggacgtataggatatatagatcggatatgcaggatatatagatgcaacgtgcatgagattatgactcatgcacgttgtattttatatccatctttttatttcaataagaacttctccgcacgtcccggagaaaagagttcccacagggaagcaactgtccaacccggagcaaagatattattataatatccctttccattgcgaccataatcccagttggtgtgctgaacaacttcgggataaaagcccactttagccacaccacacatgtgtccttcgtacggtaacaattgacgcatagaggtagaaatcacttgggcaaagtcagagaaacgaggttcatcgtattctttcgaaagccaattcaatacatcggcaaattcaaaaacaaacacatctatgtggttattctccaccgatacatttccccagccacgagttttcaggccaatatcacccagcatctgtccttcggcaaaaggaacgtcccaagtataataccaggataaagcaaaataagctgctttcttcgacaattctgcataatgcgtacgctccgcccctttagtaaccagcgccagataatacgtagcagtagcggcatacagagaagcttctttatcctcacagtttgcatccagggttgaagagaagaaatccgccttagatataagttctttctccagatagcccaccgtacgtttcgcactctccagataacgtttatccttgaaatacttgtaagccatcaccaaaggcaaggtagctgaaggggtgcttccacccgttccatctacaatggagaagtcatccttaaacttacgcgggaagctaccatcctcattctgcaaacgcaggaagctatccaaaattcctttgatacgcttctcccactcaggatgtttgcgcttctgctgcttttcgtaagtcagataattcagcacggcatacacaccctctgattggcggcggatactgtgcttggattctttaaagccacgattataatgtaccacctcattgaaaaagcctgccggagagaaaccgttctgaagatacgtatcaaaaacactgttggcactattcatcaattcctggcggttctgtaacgcaccatattccagtgcattgaaagcattgagcaacgtacgtcccacaaatccgatttcagcaacatccacatgatcgcaagtagccgttttcagttccacaccggaatagtaatgagtaggcgtattgtccacataactttccacaaagaaattactgagtacttctttcattctgtctaccgtataaggtgtgtcgacaggctgcggacggttcgtgtcataacaatactcccaagtgcgctgcacgcactcagaaaaatcagcggcatctatttccgccaactcccaggtcagagtaatgctgtctcctttgcgaagcaactgaaaagcctcaacagaaggagctaaagtcaatttacgaatataagttttcggagcttcccgatacgggaaaccgtaagaaagcacagtcatgcctcccacattttcaaatccggtatagcctatggatgtttctccggacacaatgacctctccttctttgtgagtggccagcgcctccttgtcaaacttatcaatgcggataaccgacattgacttaccatttgcagagttgaaagctgctgtaagcggagtgctcaaacggtcctcgcgcaccaaccaactatccgaagtatggaatgaaggcgcatctttgggcgaacgcaggttacgacgataccagaaaccgggcatatagaactgacagtcatcatgcttataaccggtttttatctgctctccataattgaaatacacattctccaaggctttgatgacaacattgatgcgttgttttccatctttctccgtaacctgacgggtaatgaccagcggcagattttcggaaggctgacaatcgtacacaccatcctgcactttccggagagttaatgaatagtgtttggcatcatttcccggaacttttaaagatacagaaacattctcaggagtatagtttgccgctccaatatttgcaatgcccgcagaaagcattatccctaaaaacaatctttttaacctcatattcaatcttcattttactattttacaatacaggtctttcggattctgatgacggagaattgccagacacggatggccacccgtctttccaatcaaccttatctagcatcaacacacggcctccgggattcttggtactgactgcatgataaaacacccagtcattacccgccttatccgttacaatctctgagttatgtccggtacctacaaaagcctcattcttgtgaatcagtatttcatggtggttatccagcatcttcttaccatttttatccacataaggtccaaaaagtttcttcgaacgacctacaaccgtagtataagtacttttcaatccttcacagcaagttcctatagatgcaaagaaataataataaccatcttttttatgaatatatgttccttcataggctgttcctgccacctggcggagcttggcacctttcctaacagaaagtccgtcatccgacagttcaatgccgtaaattccccggaaactaccccaaaagagatatttctttcctccatcctctatatagaaaggatcaatggaattctgtacattgatttcattgctgcggaacatctttccatgatctgtaaaaggaccttcgggcttatcggcagtggcacatccgataccacaggtccattcgccaccccagacagacatggaataataaagcacgtatttatcacctattttattgatatcaggagcccagagtcctcctttaggttcaaaatccggacgagtgcctttggtaaaagcagtacccacatactcccactccaccaagtcttttgaacgatggataggcaagtttcggatatcttcggtggcatacaggtaataataaccatcttcccctttgataacagagggatcgggcaggctataatttacaaccggattctgatagtttttgacgggcccttgcgccataagcaaacagcttatggcgacaaaggctccgattaacaatattttctgcatatattcactattacttatttacaaaccggagcttctgcctcggtagatggactattaccggcaatcaccggccaatcattctcccaaacaatccggtcaatcatcaaatagcgtcctttgctcggggtgtgtctgtcataactatgatatagcatccattcattaccctcactgtccgttacgatttccgagttatgccccggtcctacaaaacgatcattggctctgatcagcacttcatatttattgtccagcattgattctccgttcttattcacatacggacctaagaaagaagtggaacggccaacaaccgtagtataagtactcaacatagagttacagcatgaaccgacagatgcaaacatgtagtaataatcgccacgtttatgaatgtaaggtgcttcaaaagcagtacctgcaacctgcactctttctttcttggctgttgcaatgtcagggtatactctcgtaccgtcttcattcagcttcacagcatacaaaccgttgaaactaccccaaaccaaccatttctgtccattgtcttcaaagtagcaagggtcaatggagtttcttacatcaatttcacttgaagtgaacaactttccttttccgtctaccgatatatccaatgtgaaaggaccttcgggagagtcagccgaagcaataccgataccggcagttgcaggcttgcccatggcagacatggcaaaatacaagatatatttatcacccaccttttcgatatccggtgcccagactgctgcacccgattccgtaacaaacgtaggttttgttgcaaacatcttgcctccgtccgtccagtgaatcaagtcttccgacttacggattacagatgtattggtggcatatacatagaatgaatggtcattctctttccagactgtagggtcagctgcgctgtaatcagtcaatgggtttgaataaggattcttatagtttgctgttcccttattatcgtcgtccgagcaggatgccaaggctcctgtcagagccaaggcaaacaatatatatttacttctcatatattatcttatttatatctttgttcaagttcttctaccgggatattatcttcataaccgtcgtaaccatagttctgattgatacggccttgagtgttggattctatggcattacgcggaatgggccacaacacgtgatacggcttcatgataaatgcattggttgaataataatattctgttgcaaagaaattattcttctccatcatgcggtcataataccagttcttctctgaaaagttattgagtgaatatccatctatacccttttctgctttcaggaaggcaatacgggtcaactcagtcttacgatggtcttccagaaacaattctctggctctttcatccaggatatcttccagtgtaacggatgagagttctggtgcattcacacggcgacggattgtattcacatcctcagtagccagatcgttcttgcctaaccaccagtaagcctcagctctattcaagtaagtttcggcaaggcggaagatatactggtcagtgaaaccacctacaggtactttacctcctgcattcggatcatccttatcaatcagaaccttcacaatcgggaaagagaaataacagcgcatggtatcggtacagtaagcaggattaaccggttgaccgaaataagcggcactaccaccctttgaagccggcagattgtatttgatacgtgacttatcataccagttattggaattatgacgcatatcatctccacaatccttccacaactcatattgtgcatagttggtaggacgtatcttggcaagacctctacccagctcttccaactgttcgtatccatcataaatgcctgatgcatcagtcgttccgttctttccgtccggtgtcttcattttgcttccggcatgccactgcggcacgaagttacgcttacgttttgaaccacttggagaagaacatccgtccagaccgtagatttcctgaccgatcataatgccttctttgttctcaacaatactgatattctcttcctggaataggtcgttgtatacgtccttactcttatcatccatattgataccgaagcgttcggtcatcagacgcaatccgtaatcattgatacaacgagttgttgcatctaccgcctgttggaagtcaccggtagccagacatatcttagccagtaaatgttcacctgcggctctgctcacagcaccacggattacttctttaggtaaccattgtacagcatattccatatctttcttgatattcgccaagatagttttgcgggaaacggtattaaagtccagttttgcaccggtaatttcttctccgatccaaggtacatctccaaattggttagtcagcagataataccaataagcgcgatggaaatatccttctgctaaacaagcgtttctgtcttcttccgaagccataccgtcagcttcaggagcacgggtaataaccgtattggcatacttgataccgttccagccgaaaacccagtaacgaaggtgcagatacatattggtggtaggggtcaactgagtcaccatattatggatttccttcgtttcaggacctcccataacagccaagtcagaccaagcatattcatatacagaataggtttcacagtttccagagttgaaagcgtctccaaaccattcaaaattcatctgtttacggcagaggcgaagcatggtttccaaacctgctttatcaacaaaagtgttctccggtgtcaggaacgacatcgccttcggttcaagatcaacacaagcagaaagactggcagctatcaggcaagttgccagaccttttagtatatatttctttgttttcatttgaatatctttatttaattatcgttctatcagattataaggtaatgtctacaccaaatgtccagatgcgtggagtaatggccttagtcaaaggatcagaagttctccatttagaaataacgaatgcgttatccacattaatactgaatcttagattatcaatcataaacttgttgatcaacttcttcgggaatgtataagacaatgccatattctgcattcttacgtagtttctcttttcgtaaatgttcacgcccgggctatcgatgtttgcacccaaacgagcatatttgctattcggattccatggtgtccaatactcggtccaaacagagtttgaagtattgtagtaacggttagtttcgtttctcggcaggttatcaatatccatccaaccgaattctccacgcagtacaaaagagaaattgatgcatttgaacaaattcaggtcactgctcaacgtcatacgatgcttcggagtttttgtacccaaccagagtttatcgtcatcattgatcttaccatcgttattaacatccagtagtctcgggtcacccggttgcttaccatattttgcagcttccaattcttcacccagttgccatacgccaatccacttataatcatagatttcatcaatagcatgtccgatataccaaccgttctgtacatcatcgtcttcacgctgaccgataacattaccatcggcatccagcacatcaatcatatcaccgtacaggtgtttgatttcattcttattagtagaataagtgaaggtggtattccaacgtacattagaagtattgatatttacacttgacaaagttaactcagccccttggttagcaatttctcccaggttagaagcgatcttaccatatcctgaaatttcaggcatagcacggtccatcaacaagtcattcgtcttattcttataaagttctacagaaccgctcagtctgtttttgaacaatccaaagtcaacaccgaagttgaacccggtagtagtttcccatttcaagtctctgttagccaaacttgaaggatatacacctttatagtttaccccattctgaataacgttggtaatagttaatcttgagaaggcagcataacggccgatgtcacggttaccggtttgtccccaagaaagacgcagcttcaggttgttaatccattcaacatccttcaagaacttctcttctgatatacgccatccggcagcaactgtagaaaatacaccgaaaggattattctgtccgaaagctgagaaaccgtcacgacgtacagaacctgtcagcaaataacggtccatcaaagagtaattcaagcgccacaacaaaccattaccagtctgcatttcgtcatttgcactgacagtaggagttataccggcctggataccatgataactcagtgcaccattcggctggaaaccttcattgtttcccgtactttgccagttctgatatttttcagcagtatatacgaaagtgaagtcaaagttatgaattttagcaaaggtacggttccatttcaacatgttatcaatgctccattcatagtctgaatagtccacacgttttgctttaccacctgctactacacccggcttgatatcagaatcaaaatagtaatcctttctccagccgtagcgcacattgaaagttgtctgccaggtaaatccaaaaggaagagttaacttaccataaacgcttgaattaaatgtctgcgttctgtagtatttttcgtccactgaacggttcagtaatgggttggcaatacggttgtcatcccaaggtctaaccttgatacttccatcagcctcataaacgtctccaaaggggctggctgctttagccgcgcccgtatctgccttaatatcatccgagcctttatgaacgaactgcgcattcaaaccaatattcaaccatttcgtaatctcagtatccaaattcacacgcgatcttgaagcacggaattgatcacctactacgataccatcattattagtataacccaacgacacataatagttggttcttgccgtcttaccggaaacagaggcattgtaatcctgtctcaaaccattctgataaactaggtccatccagtcaacgaatttaccggctttatagttgttaacctcaataggattgaattccagtcgttgcatccaggtttcaatataatcaccggagaaagagctgtcatagcttgcccattgttcacgagaaacgccatcgggcagactattgggattatcataatatcccaaaccatgctgttgttcgcccggcttaaagtaatcaattgttttgaagtaatcaacacgtctctgcatatactgttcagcagtaggcatctccggcataaaagtagcttgtgaaacacctatttttgtacttacgttgataatgggcttctcggaagaacctctcttggtattgataagaataacacctgccgatcctttggaaccgtaaatagcagtagagctggcatccttcaggatatccatactttcaatgtcattcggattaatatcatcaatgttaccatagaataccacaccatccaaaacaatcaaaggagaagtactggccttcaacgattgtttaccacggatcagaagcccggaggcgccgccacctgcatcagtagaaggagtgatgtgcacaccgggaaccgtaccaaccaggaagtcaagagcatttgttgcagctctattctttgtcacttcctcgccaacgtgtgccacggcacctgttacatcctttcttttcatcgtaccataacccaccacaacaacttcatccagcaacttagaatcttccactaatgtaacgttcagagttcttgcattggcatcaatcgttttttctaccgtttggtaaccaatgaatgagaatactaaagtagatttttgcgcaggaacgttcaatgaatacttaccatctaaatcggtaatagtacccaaagcagcattaccctttacagtaacgtttacaccgattactgtttcgcctgtggcatctttaacgacacccgtaacgattctgcccgattgggcttgagcataaattgtagaaatcaggaggaggagtaacatcctaacccttgcatcaaaaaagcattttgaaattttctgcttcataatattaaattttaaaaaaaatgtaaagacttacttggctttaaagcaagacaaaaatagatattcaaacaagcaatcaataatacagttatctctaaaaaaagaaaaaatgtcccaaatcacgcgttagaaaggtttaaaacagcaatagacacaataatctcaattatagggacgtatctatcattttattcataggctgtaagctgcgaaactagtcaattttataaagtttcagaataacaacaaaggcgtatccttaatagaacacgcctttgttctagagatatcgaatctgaaagaaaatatgcctctcgcagaaaataatctaatcaagagttcgaactacaagttcccctgttttattcgtagccggcagagttatttctaacattcctgcatggccagacctatactgaaccggctttccgttgaagaatacttcatattgatgccctgcatccatacagacaatcatgcaacgctcatgaggttttgtcgaatcatcaaaagaaagttcagccttatatctggaatgattctcattaaaatcactctttgtaatccatacctcaaaaccggtggagactttacccggcttatagtatgctgcaaaccaatttaatataggagatgaaagccccgagaactggtgccaccctgctcctctccccgacgaaatgatgaaatgctcgaatgtgaaatagctttcttcacactccttctcccaattatccagagctgtatgtgccacccggtaagcctcttcccctttacccaaatctaaaagagccttccacatcatccactgatggggaaaccagacagcaccgttccaatatccatcttctttataataaggagcagactgatcgaccgttgagagcccgactttagtccacagttcgtcaggagaaaataaatgttccatcaaccggtccacttgagcgggagaacaaatacctgctaccaaaggggtgaccccatccagtcccttattaaaattagattgatccttatactggaaaatatctgtcgcatttcccagagaatcatggactacatatccgaagtatccgctttcttcatcccaagagtaagtttgcaaggcatatgacaagtatttgatgatccgttcatacgccttcacatcctttttcagcctcagttccttcgctgccaggcgcagaatcttcgccgcccgcagataataagcagaggttaccacaggagtcaccgattgatactgcgatttattaccgcgtaatgcatgttgaggcggataatcgtcccatccaccggaattatagaaataatcccaagtacgaagcagaccggaacctgccattcgggtaggtgaatacggatcagctccaaccataaaatcaaaatattgtttcagcctgggatataagaatctcagcgcttcctgtgacaggctgttgttccacaaatcagcataagcatacatctgaatgggtaatggggtaccgtgatggatgaaagccgattcactccccaccggagtcgtataagccttgatacattcgaaagccttgaccgggtccacatcaatcagtcccaacgcaatgaagccggagtcccaggtataaagactgttccaattcttacccggcgtaaaatgtctgatgtattccttctgcgtataaaccggatatacgatattcgacaagagtgaggcttgcagcaaacgattccccagaagatacttctctccgcctggcaacacctggtcttcaggcttcgctttttccgcagaactgatccgtgcgaccagtttatccggtgtcgaatggaaatcttgcagttcctgcttcacctgttctttattcccactgcataccagcatgtaaatggtctgttccgagtcaggttccagtacgatagggcgcaaaaaagcattggcataatgccagttcctgtccccaatcagtcttgaagatacatgttcatgcacccttctacggaagaaagactccaattcaccgttcagtatctccctcacttccgaatgttggtagttccaggccacgccataatagttgtcacaatccttgtatttcagtataaaatcctgtttggtttctcccacctccattacaggagtgaaaggaatcggcgtacggaccacatttactttgtttataccgtcaacatcccctataaagaatccatccagactgattgcaacagtacttcccgaaacaagttccagtttatattctccggccttctttccataataaggaactgacaagaaagagaattcccccgtaccttccaattctacagattgttccaccagtcctttcagacacagtacggcactctcccctttcttcatcttaaaccggagacctatcgccccgttttcctgccccggaagaatgtttaccagataactcaaccggtcaccttcattcctgccgaaccctcttcccagtatggaaccatcgagtgatgaaacactgcgctcctcattccgttgccatccgtcatacaccagtttgtattgaggggatttactggcaggttcattctcaatatagtcaatggcattataccattgcaggccggacgtatccgaaaccgctacctgcggatatgtctcaggataatctatatacgccatctgattcaataccagattttgaggcatactcgtattgttgacgcaatgtatcccgaccagcgtacggttatcatccaatatgtgataggtgacatccgtataaacccggtctttccactccagttcatagcggtaagtgatgcgggtcatctccggatttatttcccacggatagtaggatgattcgaacaggacatgcggcaccaattgacggttccggtaatacccgggcatcaccgagaagtcaaaacgtatccctttacgcatatcaggtatgtgcgagataccggcataacgtttcgagtaaggcccccatgtatgcaatgatgctatatcatggctattgcccgaagaaggcaaaggaaaaacagttcctgcacagcaaagggtcataattacggtcagaaatgtcatcaagtatcgtttcatctattactatagctttagtattcggcactatgtgcactttcatcattaatttacagaatcatttacagcaatcctacattatgaaacagtcgttaccttaacctatatcagtcgttacttcattgccattcactcgttacttcatccctattcagtcgttacctcattatagagcacttttgcctactgataatcaaagagttgtaaaagaaacaaagagtattatccaattccataaatcccaacaagcaaaccactgatacatcattcagtaactcctattccagacatatccggagttacttttcaccccagcaaacggattgcaggaaccatgtcgcttgctcgctcttcaaaccctgccgttccaataccgaaggcaattcatgataactcttccagaaatcagagatcaaagtgggcatttcagacggagcatacatcacagcctcattcagacttcccattttgccgaactcttctttaaagacaatatacgaattacgatacttcagttgttccatagaccgggctattcttttggatgcccctaaaagtccgttcatatccactttcccggacggataaatgatcttaatcactttttcctggttacaaggcaactccggcaaatctaccagtaatgcaaagtcttcagccgaatatctgtattctgccggaactccatttaccgtgacggactggggaagcagagatgaaagcactttcaccgtgaacggacgggcaagaggcatttctttatagccaccttcgcgcttgccgataacaatcgtttgctcattaccactacgggcagaggtcagcttagtcacggcatactcggatgcataattcttatcatttccgttatcttcatacaaattaaacgccgttgtaccgcttccaccgggaaacaccgtcaccgctatttcttcgtcattattgttaaggttcatcacattcttcagatacaaaggaagtatggcacccgcttttacataaattggatattcatcaatggcgaaagagcgttctacaatccggttaccttccagtaaagctcccgtatgccattcgtaccattctccttccggcaaccatacacgtacctgtgcataaccatccttggctggagtagtgaccggtgcaaccagaacgtcatctccaaacatatactcattgccaaagtcgtaagcttctttgttctccggataatcataatacatcggacggcaaagagacaatccgtcatcgtaccccttacgagccatggtgtagatataaggagccatcacatagcgttggcgaatcgtttcacggatgatatcacaatattccttgtcgaacacccaaggttctttattcagcttagcccctttctgggagtgggtacgcataatcgggcttaatgctccgaattgtagccagcgggtatacatttcgggatctatctggctaccgatatgtccacccaggtcatgactccaatagccgtacaacacgttggaagctgtagaattgaaatagggttggaaatcaagtgatttccatgaaatcacagcatcacccgagaaccctacctgataacgatgatttcccaatcctccccagcggtggtaaagcatcggacgtgtctcccgacgttgctccatatcgctgaaaaatgcatagttaatccaccaggtattactcagattcttcatctttgagtcgaacattccctgctgccagtccagccaccagaagtccactccgtctttttccatcggagccagaatattcttgaacatattcttcatgaacttcttatctgaatttatccaagggatcgtctgctttgtagccgggtctacacccatgtccttagccatctccggatatttctcttcataagcggccactccgtctgccggatgcaggttgagtgtcactttcacgttattctgtttcaagtatttcaagaaaccctgaggattcggaaataagtccctgttccaggtccagcctgtccagccccccttacctttctcggtataatgccagtccatatctaccactaacacgtccaaaggtatctgataagtatgaaaattatcaatcagattacggaactctttgtcagaatacagccaataacgcgaccaccaatagccaaatgcgtaacggggaggcaacggcatcttaccagcaaaaagagtatagtctttcaaagcctgcttatagtcatgtccgtaagccatgaagtaccagtcttgcccttcattagcggggcgttccttagcccagtcccagtccggatcattatcaaacaaaagtccgcgggaatcgtcaatgagcgaccaaccatcagttgccaacaggccgtcttccagtttcagtttatcccctttcttcgtatcagacacccaagtttgagtctgtgtatcaccgtccatcccatcaagagtgcgatatgtacctttcagattgcctttctgttgcattccaggcttccaggtgaaggggaatgccccctttacagcttcgattatcagattattgttcgtaaaccgcccactgtcttttttataacgcattttcatcttggaggtggttatttcaatccatgccccccttgtcttcagtttgtaatcaacctgcggatataaacggtctactgcaataaaagacttgtcgtctacaaattttccatccggagcatactccaaacggagcgttccatccgatatgaccgtaaaccgtacattgttatcagtataagcaatattctgctgttcaccctgcgctcgcagtgacaacaggacaccctgcaaaatgcaaaggataagtatcaacttcttcatcatggtactattgattttaaatggtttctgaattcgatatctctttacgtaacattagactatatgtaatataacgacaacaaaaatagggaattatatcagtctgacaccttaaaaacgattcaataaatagaagattcgtatcaaaacaaaagatgtaggattctatcgaatcctacatcttccatttaagcaattatatagcaatactttttaagaatttcctgctattcaagcaaggaagcaattctattcaccgttcacaatggcttttatttagcaacctcttgttcatttctggtaggttgcggtcccatataggaacgcttcataccgccaaagtccaacacaaccttttgcagaactgttccggcatctccacagatgattttcaccgtatgcttacccggtttatcgatatggagagtggtcttgttgattctgcaattcttcaatacgctttcataccagatctgggcatattcgaaagaagaagtagatggagtcattaccggaccttcgtctatacatacaccatatttggtttcaacatttgttgcttcatgtccggcatatcctctatccttgctgatggggaatgtaggcagcacatacgtataaacgtctactgatccctgctcaaacgtatagaaatcatattccaggcgcggtgtattacgtcctgcggtacgttgtgccggagcgataggattacccaactgtacagctgtattctcgcatcccaggttcggaatcataatcatcttaatggcatcattctccactttacggtggaaacttgccgcatctatcgaaacatatccgttgttttcaacaaacagcgtatccatttcggccaatgaaggagaagtaggattaaagacggagatatagacactttccttctcaccgcgatcagaagtgatatccagtgttccaagtattctttcaccggcaggaaccttcgcccagtcgatagaaacctcgatacgctcttcagtagcagtctctccggatttcttactaactaaaatccagtcatttgttacagcagctttccatttcaacggagtagcacccttattgaatacatctacatagtaagactggcgcaagtaagtattgaaacatggcaatgaatggaaactctggagacctttcaacacggcctcaccttcggccattacgcctaaagaagcagtaggagccaattcaacatctctcaatttcggaagttcaaaataagcagcggcaaatccctgtttcatcgtcattacatgatcccacttaccgctaagcaacgagttatagcccttggtaattacttccaaactgtcgtaacaggctttcgctgatttttccagttctttggttgatgctctctgctgaatagaataccagcggtttctttgtccgtccagtatcattctgttcaacaactcgcaccctttcaccggataatacagtgtctggtagaagcatgctttctgtttctcgtccgacatactgttcaatatcttctctacggtgcttccaatacgacggtattcgctcaaacgattatccacctcacgatagttggtaagcgaaaagtccgtatccgtattccgttctctcccgtgcttatcagtagtccattggtagccccatcccataaattcgggtttacgcgcgaaagccagcttatagaaagaattaaccacatcctgatattcgttgcggtattgattgcccaacataccacacagccattcggtacggtagttagctgccctttcaaagttgaaagaatcaatatcgaaagccatcgtcaggaagtaatcaacagcgaactcacaggatttgatatcaccggcattcagcaaccagatgcgatctgccgttgcatcatacgctttacgaagttcttcatacatcaatgtaggagaaatcgtgttcatccaaagatgatcgtgaggcttaccaagataagaagaatggtagtacacacccgaacggcccgaacgcttctgttccttcgggctgctcagacgtttcatataaccatagttatcatccggccagatgattgttacgtcatccggtagttccagaccttcgtcatatacatccaacacttctttatagggagtaaatgcttggggaatctcttcacccggtttaccaatggcatcaatcaacatctgcctttgtgccatcagagcctcctgaagcatatctttccggtcgcccatatcattgcttgcattcatggctctgtcgtgcagtccgcgtaatgccagcgtatatacattttcaaagggagcacattccttcacgcgtgcattcagcacactgtctacgccttttttattattgatgtagtcccactcacccattttatcacgcttccattcacttgccgtattaaacaataacggttcgcaatgagaagaacccatgatgatggcaaagcggtctgcaaccactctgttctcgggaatgcggtgaaatgccatagacgcatcgtgcatggccggacacaaatagttggcctggaggcggagtaacagttcgcaaaccttagcgtaagtccggggaccgaagttacccacttctttctcgaagtttctcttcgaccaacggtagaggccccagtcttcatcattgatgaaaatgcctctgtacttcacagtaggctctttagatatatatttatctactttcaggtgtaactgatccttctttacaataggagcatctgcccaccagtaccaaggagatacaccgatagttcttgacacggacagcaatccataagcagcacctctgcggtcgctacccacaataaccaatgccttgtctacaccaggaagcggattacgaacgagttgcaccagatagctttcccaacgatccttcaaaggttccacgtccagtttcttcttcgcaatcatctggtcaatccattcattatgacccaaggttccgacaatgatacaattcttctgaggagcttctttggtagtagcaacgcccagaatttgtccactcacctctttcacatcattcgcaaatagtcccgccgttgtttttacaacttcaaaatcttgtgcgtcatagtacacgcaggctttatccttcttgcctacgagactaaatacgttggatccgctactattttgcgatagcgaaacctgagccagcgccactgaagaactcagtagcagcatacctcctaataaaacagatttaaaaatactcatggtttatttattgataatttataagttacttctccatcagggcgaccacacaccagaggtaaggtccttgcgcatgaaaatcaccagtacgacgcggacggtcataatagtattgcttgtcgttcttcttattggtacctacgcagatttctctcacctgattcttttcggtaaggtaagtcaccaaagccatccatgccttgcgggctgccggagcatattctttggcatccagccatccgttctttacccccgtaataaaagcgaaggtaaacatggcagaacccgatgtttcagtccagcattcgggatcatcgagcaactgattccacagaccttccggattctgatattccttcagacttttcatcatggtcaggtagccttccatgatgcggggacggtctttgtgcttcttgggcaaataacgaagcaattctgccatacctgctgccatccatccgtttccgcgcccccaataaaaaggtacgtccggtgcatgatagaagagaccgttgggacgttgcaattcatccagatacatcaccatctctttggctgcacgatctatatatttgctatcattggtcactttgtaggcatgtgtctgtacaatggtaatcatgtacatatcgtcaatccaaagacgtgtctgccatgaatagcccttctctgcccattccttctcacttggtttggcatcttcgggaacttcccattgggtatcggcataaggcaatcccagttctttgtagcgttcatccttcgtcacccaataaagctccagaggcaaacttccgaacatattcagatcgacatgattcttgatgggcaacaactccttttcggtagtaaacagatgctcaaatctggcttgcagaagcttgatgagcgctttgtctttggctgccgccgcatatttaagagaaccgttccaatagaaggtttcaggataaccaatccattttccggcatgcaatgcatgtttctcggttacaaaacggtaggcaatacgtctgccgatttcatcgggagtatacccttcgggaaaattcttcagaagactagtctgggcgattagcaactggaaagatgataataaaaataataatgcgaatactttcttgtacataacaatttgaattctatctattaaacattacaataatttactttctctggaatatccgttgatattacttcactttcaatagtttcttggtgtcgtcgcacacggctaccgccactttggagtctgcacagccgtaataaagatatagcttcttcttataataggccaatccttcgataaacacggttccgtccttatactgcccgctcttctcaaaagaagcttcaggcatgaagaaaggcttgtctaaacggcccaatactttataaggatctttggaatcaaacaggagctgaccagcgcagtaagcacctgccggataatttgcatcgcctctctttttatcattcttaccattatacatcaatacgatgccttgtttggtacgaatagcaggaggaccacattcagtcatctggctgtcgaagtatccgttacgcggcctggctattttcaacaactcgttgttctcatccagcacaggataccagtctgtaagattgtcggaagtagctgcatgcacagcatattctccccaatacatgaagtacttaccatctactttatcgataaccagtttcccacctttcaccttggtaagcatggaggctgacttggtagcaattctggcgaaacgcccgtcatacgctttttcaaaagcaagaccgtgcttggtccagttcttcaagtctctggaggtagccaccgcaagacggggggtcttccggttccacgccgtataaagcatcacgtataatccgtcttcggtcattgccactcgcggatcttcgcaaccacccggacactctatattctcaaaatcatctccaccggggaaaagtaccgggctgtcgaatctctttatagttactccatccacgctttcagcatacccgatacgggaagttctcttcccgatgccttgtgccgagttatcttcagcacgatagagcacgacaatctttccatctttcacggtggcagcaggattgaaaatatcactttcctcccacttcacctgttccttgcgcatcggacaatagaaagaggtaggctgtggagtgagtacaggattgacaccttcagggcgatgaaatgggccaattacccagttctcctgttctttcttatcggtatcatctgaagaaggcagagtagaaaaactactcaatgacagcactcctatcaaaccgactatgagttttaacttcatcttaatatctatgtttcgcatggttaaaattatcgttttattgacgaatatgtttataaatctcggtcaatacttccaatcgggttgtttttccgggaacagctcggggcttaaacccacataatgtactccagtcctgcaacgtcttttcatcgaccgttccttgcaaatccgcatcccatccgggcaaataccctctcaatcccatatattgagccaaatggaaaccagtattttccggacgcaagtcacgaaagtaaatcagcgttgctttctggtcgatcagcaaatcctgcaatatggacatatccacatcctgaacagcaactttacggtcaatagccagtgaagcagcgatacctgccgcctgccccaatgccatccaacatggctccatacgcaatgtggagaatccgatatgcgaaccggatacaggtacaggtaatagcagattatctacattccggggtagaatcacgcccaagggcaccgtatacactgctgtagggtagctgatgaatccatccaaatgtactcttccggcttcccgctttctggcagcatgcgaatcgagtgcataatggctggctgtcacgctactgccatgcaaaggcgggcgtttacccggtgcagtgggtaaagcatccttagcagtaaagaagtaaactccttcaaagcgtcttccttcacgcacatagacctggcggggaaaatattcattatcctgatattcatctttagccaatccccattctagcattgctttacggaaatgctccggtaattccggatcattctgggcaaaccagaataaacccaatgtataatctttcagacgtttggcaaacttatctctccactcccaggaagaagtaggccaaggccagttctcttccggcagatcagtagagataaatgcagcatgctgattattgccatctgtcttctgattaggcagtttcacgatactgctcagttttctgattccccaactgtctcctggaagtttagtctggttaccgccagcgatatgacgacggttttcttccatcatttcatcagttaccttcagcatggcccgttgagtattctttccggtccatacatcttcaatcagtgagacatattcgttcctgttatacgatgccggcttcggaaagaggacacgattatcaggatcattagtcaggcaaaggcgatagttatatgcctggactgcattatcagactctcctgtgctaccattggcgggcagacttttccagtattcataggttcttcctgctccgggttctccgaattcggctttactttccctgcctacgcggaaaggcacacctgccgcagcacccagatcaccttcataagtggcatccacaaagatgtcaccctgataaagttctttctctccattctcacgattcagtatacagatgctttcaatgcgcccgtttctgagagtgatattctgatcttcagcatcgaactgccgcataagaagcacggtaatcttatccttatgttcgttcagcatatcctgatagatagaggctgcaacagacggttcgaaatgaaagccgtcactgcaatccttcagctgctgagagttctttccataccgttctgtataatattgcttgattctggaagtaaactccatgaacagaccggtagttgcctcccgggtagcaatatcagtagctcccagtccgttggccggaagtcctccaatatgttgactacgttccaatataaccgaggtcttgccttgcctggccgctgcaatcgccgccattatgccaccgggattaccgcctaccaccacaatatcaaaatgattttgagcggatatcccccagctgagcaacaacagaacagtaagaatatggaatctcttcacgttatttttttatttgagtttatacttctgagtagttacattccaacccttcaataccagaacagctccctcagtcaacttttcttccgccgtttcaatggtgacagttttcttttcacccggaaccagagagaaaaagttatccgaatagaacgacgggcgtatcggactcattttggaattgaggaattgcaactgattaaagaaagcgataccaccggaggtattcttcaatgtaatgtctacgaaatagcgaccgtctgcctgacgcgctttataggagagcttcacattagccgctttcagcttattcaagtcttcaaatcctgaagatgcaggaccggtcagagtcttactgccttcatacttatcatttgatctccaatagaagttggaagaaacgtctttacccttctcatctttcagcaccagcttgataaagtgaacctgagagatgttttcaggaaaacggatggtcagtacatcattggctactccatcttccggaagattcacggaagcagattcttcatataccttccggctattgatatcatatacccgtgctatcactttgtaattattaaaagagcgataataatcgttcaccacagatactgtattcttcagataatcgaactgggcatgtagtggctccaatgaattggctgtatggtacaaagaagcagtgggttccaaagaccaatcccacatacgggaagatacctgacgcatggagcagttatgataccaaaacaagagtccggaacagaagcgatcaccataatccaacttattgtaattccacacttcccagatactctttgagttaatggcacccaacagttgtcctttctgagcaaactcatcaatagaggatgactttccatagttgttcaccaaatcagtatacatggtagtcatcaagtggaaaccatttccatccaggtaatcccacacctctttattgataggccagaggtctttttcgtccatcatctcacgaagaatctccactgtgggaagtgtaggcgcaccatactccggattgaaaccatcgacacggcttccacgtggagatgccgtattttcataatgctgcatcggattcacctgcttatacggacttccatcatgcactccggcacattctgactgcatctgatatcctcgcgtaccgtccagtttgttcaataattcaggggtacctgtaacctcggtactttcattagaggctacataataagccagagaaggatgattgcggatacgtttcacagtagatgccacattatccagataattgcccttatcgttcggatggcgtgtatcacccgtcatccagaattcctgccataccagcagtcccatctcatcacacaactggaagaaataatcggattcggcaatgccacctccccacatgcgtaagagattgacacccgactgacggctatatcgcagttcggcatacgtacgctcgtcagaagttctcaacatagcttccggtatccagttcgttccacgaataaagagacgcttgccattgacataaaagacacgtgacttatcaggcgtattcgtatcggaagtaatctcacgaataccgaattttgttttaaccgagtcgcaaactactccatcgatggatacggtcattttcaactcatacaggttttgaggacctttgttcacaggccaccacaaacgaggagagttaatcactaattgaggaaattcatccggagaaaaagacaagattttctcttctccacgcaaaactttaagctttttctcgaaagttatattttcacctgtaatctcacctcttaccgtacaattaattccgctaaatccggtagtaggatttacaacttccacagaaatgaactcacgtgcctggtcataaccaggtttacgcaattcggatttcacaaaaggatgacgtaacgccactttaccggtagcatagagagagatgtttttccagatccccgtattacggtcacggataccatccatgaaagtaaaatcccagcctacggtcatcagcatagtagtgttcaatccgatatttccgttcccaccattgtggaactcacccactgcaccccaggacttgggtttggcactgccggggacatcaaccggatatacttttatagccaatgcgttagccttatctatcttcacaaagtcagtcacgtcaatataatcctgcataaacatacctttaatagtactgagcaggtttccattcacccatacttcggcacgatagttgataccatccacttgcaaccagacatgttttccttcaaatgatttgggaactgtaaattcagtccggaaccagtaggtataaaagtcacgaccggtttcagagatatccggtattaatttggattcgatcttattgttgattccgtaataaggttccggatatttccggttatgtaccaatgaattcagaactgtaccgggcacaatggcaggcaaccagttcgcggtcgggtaatctgacaatgaaaccttttctccaggatctgctacatctcctgcctttatcattttccactgatagtctccattatgggtaatttccgagtcgagccagaggcgttcagagtctctgacatcatttactttggtttgtccggttactactgtcgaataggaaaacaacagtacaacaaaggtaagggccttcacccaactgcttatgttcatcttataagtataaatagattttcgatatgagattattaaagtaatgctatcttattcctccagaagtgcaacggcacaccagaggtaaggagcttgtccatgataatcacctacattttgtttgcgatcatagtaatactgtttgtcgttcttcttattggtaccttcgcaaacagatttcacattatcattttcatctatgtatttcaccatagccatccatgctttgcgggcagcgggtgcatattccttggcatccaaccagccattcttcactcctttaatgaaagcaaaggtaaacatggcagatcctgaagtttcgagccaacaatcgggatgatccagcaactgatgccacaaaccgtttgaagactgatatttcttcaggcttttcatcatggtacggtaaccgtgcagaatacgtggacgatattcactgtcttcgggcaagctgctcaacaattcagccataccggcagccatccatccattacctcttccccaatagaaaggaacatccggagcatgatagaaaagaccattcggacattgcagttcgtccagatacatcaccatctctcttgcagcacggtctatatatttacgatcaccggtaactctgtaagcctgagtctgcacaatagtaatcatgtacatatcgtcaatccacaaacgggtctgccaggaataacctttctggtcccattctctttctttcggtttggcgtttgcagggagttgccattgagtatcggcataaggaaggcccagatccagatagcgttgatcctttgtaatcttatacagttccaaaggcaagctaccgaacatatttacatccacatgattcatgataggcaataaggccttttctgttgtgaacagaagctcaaatctgttctgcaaaagcttcacaagctcttgatcattggtaagtgcagcaaactttagccctccattccaggtaaaagtctccggataactaatccactttccaatatgaagcatatgctttccatctacaaaatgatatgcaagacgtttaccgacttctttaggggtatatccctcgggaaaatcggtcaataaacttgtttgagcgaatacgaactgaaaaggaagtaaaaacagcaataataacgacttcttacacataaggttaattctttatttattagacattaagaaacacataattgttatcatggtataatctcttatgagacggttacaaagatagcgcacagtatcttctcaatacgaaataagcattccaataaatagaaaaaacatctcaaaatcgcataaaagccacaattttattccaaataaagccactaaatatcagtcatcaatgaatttgttcactccgtcatcctgagcttactgaaaaatcccatttctttgcacaagttgcttcttacttactttagccggagcgtccggaacattcggtacatgagtttaaactttcccggcaatcagttgtatagacagagcgtgtagcatctatatatcggacgtattgcatctatatatccaatgtgttgcatctatatatccaatacgttgtatctatatatccaacgccaccgacatatagatgcaaaacgaacagaaaaaagaaagacgttcaagacttccaatgccgatgatttaactcatacaccggaaattccggatgcctccctttagccggcaaaatccttcggaagtaccccgaattgcttcaggaagcatttagagaaataagaagaagaattgaacccgaccatataacagatttcattgatacggctctcaccttctttcaataattgggcggcacgcttcagacgttctatgcgtaaatactcattgggactcaagtctaatactcccttcatcttacgatagaaactggaacggctcatattcaggctctctgccatatcatccatactgaattcctggtttgacaggttagaaagaattatttcgttcagcttcttgataaattcttcatcagccttggtcaatgccattgtattgaccgcaacaaaaggagatttagcaaaatccctgcgaagtttctcccggttatttatcagattagaaaccacagccaggagatattccggtgaaaaaggcttttcaatataagagtccgctcccagttccattccttcaatcttagactggatatttgtctttgcagttaaaagtataataggaatatggctataacctacattcgattttatagtcttgcaaagttcaaaaccatccatcaacggcataacgacatcactcaccaccagatttacgaaattactatccaaagcttccaaagcctctttaccattggtagcggtgattacagcatattgagacgataactgacgttcgatgaaagcgagcatttccggattgtcttctacaaccaaaaccatatgtttgctttctttcgaatgtttcccttccaatttatcatccggataggattcaccggatgtttccgcttgcaactctgcatctttattctctacatcagaatccagagctatgaccatatcctgggtgataggaagtgtcaagcggaaaatgttcgcttcttctccctgaaccatgaccaaagtgccacgatggagctctgccaatgaacgggaaagagccaaaccgatacccgcacctgtagtaacctttccctcttctttctggctaaaacggacaaaaggctgaaagatctcctctttcatctcatcaggaatgattactccgtcgttcttagtcaccacatagaaagcctgcttttcctgatctacttccagctttatatgcatataactatcagcatacttcatcccattatttaaaagattacttataatcttcgtaaaagcttcacggttgacatgcgcacagaagttttcattcggcaactccaatgtaaagtcgagacctttctggcgcgaaagggaactaaatcgcatataagtctctctcaaaacattagtaatatcacatttggtaaagttcagactgtatccctgactctctacctttctgaaatccagaagttgattcgtcaggttcagcaacctttccgtattatgctgcatgatgttcagatcttcatgagtttccgggtccagatgctttttcagaatgatattctccaaaggtccttttatcaatgtcagcggagtgcggatttcatgtgctacgttcgtaaagaaatctatcttggcattataaatctcacgttctttctcctgttcgaacttctcaagctggcggcggtgctgcctgctgctacgttgcttgaaataccagaaagtatatacaaagcaaacaataaacaacaataaataaatgcaataagcccagatggaaagataaaaaggaggacggatatggatatataacaactgttcttcgggtccccaaataccatcactattggacgctttcacacgaaactgataatcaccatgccacagattggaataagtcacaatagggctttcccccacagttatccagtccttatcaaagccatccaatctgtacatcaatttattcattttcggcacctgataacccaaggctgcaatacggaaggaaaatgagttctgattagcctgaagggtaatgctgtccgagaaagtaatgctcttatcaagaggagtattctcttcatcggcacgaacttctttattaaacagcataaaatcggtaatcaccaccggcggcaggttcttattctctgtaaatgtcttaggattaaatacaataaagccatcaatactacccagataaatgttaccggcttcatccttatagctggaacggtagttaaattgatcaccaagcaatccattggccgtagtatatcccttcacctgtttagttacagggttaaaacgtaccaacccactattcgtagtcaaccagaacagaccctccgcgtcttctacgatctggtaaacgacatcattaggcaatccgttggatgaattatagctggtaaaagtctccgtttcaggatgaaacagacagaaaccacctccttgcgtagtcagccagatctggcgatgggagtcttcaaaaatactcaaaaccttatcataaggaaggctctcttgattaccctcattgtgcacatagtttttccatctcttttcattcacattatagcaataagcgccattcgcataggttgccagccacaagttaccgcccgaatcctcctttatatcatatacaaacctgccggccagttctgtaatcctttcaaagtcatccgtttgcccattgtattttaacagaccgaacatcgttcccaaataaatatcaccagtcgttgttctgcaaatagcaaagatgctgttatcaattaatgaacgtggagaaccatttttctggtaggttttcaggatattaccggtattagtatctacaattttcaaacctttagagaaagttccaacccacaacttatcacccaccatacagagcccatgaatattcgtaaacccggaactgggtgcaaagaatgagaaggtcttggtgctcggatcaaaacggttcaaaccaccatcttcggtgccaatccataatatgcccttattatcctggcaaaactcacggacccgtttgccttgcaaattattgtccccatctttcggataatacttctcaaaataagtataggatttcggataataatctactcccccaaaatatgaacctacccagatgccactttcacgatcctcacacaacgaataaacggcattatcggacaacgaataaggatcatccttagaactatgcaaatgcacatacttgtccgtacgaagattgtagatataaactcccgattcagctcctatccacagttcgttatccgaatttaccaacaggtcacggctatataccatttcaccagtttcatccatcaacagcaaatttctcaggttaccggaagtcagattcaactcctgcactccctttcttatggaacttatatagatgcaattatatgctcccggaactatcttcatgataacatcatccttaaaaacctcatcactatccttcggggaaagataagggtgaagcgtttttaaattatccttggaatagaacaggccattgccataaaatcctacccagattgttccactattatcaaaagcaacgctctgtacattggctgagaactcattcaatgtataattatgaagttggcctttttgcggctcataacagaagagtccctgtgtttcgaccgctatccatacccggccctgtttatctcccgaaatagcggaaacagtccgttctatctttgtattctccccactcagacggtcaaatggaataaaaatctcctggtcagaataataaatatacaccccggcatctgtaccaacccagatattccctttattgtcctgataaagacaggtcacgaaattgtttcccaaactatgattatcagtcatatcacgtttaaagttccggaatgacatcccatcgtatcggctcagtccacccttggtaccaaaccacataaatcccttcttgtcctgtataatagcattgactgtagtctgggataacccatcctgaatgctgagatttttgaaatagtaatgttcatctgctgcttgtgcccagcaaatgatatagcaaagaaaactaataagggctattattcttttcttcattttcgtgctttttatagattcatacgtcaaatatagcccaatttgacgataaacaataaaagaaacatttcaataaatagaaatatcgtccctttaagattcaagaaaatcaatcaaacaacggtttataacagaacttcgataaaaatagcccttttcatcgaagttctgtgactcaaaacaagcgtcatttcacaagtttaggggttatatactcttcactaattctcatgcggtccactccaccgacattttcaaacgaaacttctccgatgtacatggcacgcggatgaatgttatccttatctttatgagcatgatagactatgcgaagcttgccggctttatccgtaaacatagcactatgccccactccaaccagcttaccgggcttttgcaataaagggttttcatcatacttcgtccatgtacccatcagatcggtagccgtagcacagcctacaccataaaatggactttcataactgttagcagaataagacatataataaattccattatgcttaagaatataggaaccttcattcacgcgaggccagactttctcccattcctgagttacatggaggcaaggatgcattgtctctttcttgatagtaatcaaatccttttccaattctgctatccaaatgttgttaccgtcattgaaacgtacaaaggataaataaggcgtaccgttatcatctataaacagagaattgtcaatacacttctcatcagcaatcatcggctccttcttatcctgaacaaacggtcccgtgggagagtccgcaaccgctacacagatatgttcatctgccgaataatacatatagaatttcccatttacaaaataaatctcaggagcccagaaccaacggtccgcccaggaatcttccttattcaatgccaaccctccatacttccaggtcagcaagtcatcggaggtataaaattcaattcctttattcgaatgcgtaccataggcatagtatactccatcgtgcagcaaaatgaacggatcacccaaaggcacaggtgtttcagtggtattgacaacagcattgtcagcactctttttagaggaacattggcaagatgccaatgttccaaacataaacaaacagacaagaaataaattctttttcatacaattctatttcgataatactctattgacacaacctgaatacatgcttcattagtcagtaaaatgatagttataagggttccgcttaaaatgataacgatgtcttggtaatggcaacgggtcctgcaaacgcaattcccaggccaacaattttgtcagcaactcgctctgcttatctatcaacttgggatttccaaataaattattaatttcatacggatctttcttcaaattgtacagttccccttttccataactattcataatcagtttccagtcacccatacgtaccattcgggaggttccactttgagtccatgtattcagttcgtcaaaatgagctaccttattgggtcccagcgcaccttcctgctcaaaagtcaagctatcgtccaaaggaacatcttctccgccaaaacctaactgtacaacaacgcttgaaaactcttctttcggatattctttacccgtcaacataggccacaaactccgtccctgaacacctaccggtattgaatcacctatcgcagtacagaaagtagggaaaagatcggccaacgaaacatgcgcatctatagctttaggctgcttctttatctgatagcctgcccaaaccatcggtattctggttagagactcagacaagcctactcccttacgaattagtccgtattcaccgcaataatctccatgatcggacagaacaacgatgatagttttctcaaatagtcccttttccttcagatcctcaaccaagcgtttgatctgatcatcaatgagacgaatcatccccatataatttccacgcaaccgaggcagatctctttcaagatcaggacaagaagcgtcttccagttccgccagaatctgatacttttcccccttcttcaatacatccttacgtgaagtcttcacagccggaatcttatccggtgcaaacattgaataataaggttcacaaacctgatacggattatgcggttcagggaatgaaacccatacaaagaacggattgtccttctggctatctatccactctatagcctcatccacaattctcgtaggttgctgatctttcaaaggtataggcgaaggttccagatactgcccgactgcctctttaaagaatttggaaatagcacgctctccttccgtcaccggcttattcttcccccagtgagaatattcagaccagaaatccatatcctttgagttcagataagcatgattcttacctactaaagctgttttataatgattctccttcagaacggttaccaagtctttcgcataattaatgtcacgcacattgtgattggtacgtacatgagttgcagttggaaaacggccggtaaacatggaacaacgtgcaggagtactggccggcataaccgtatacgctttatcgaaccaagcgttctgatgtgccaattcatcgacaaatggagtaatatccatgggaaaaccttcacgtccacacaaatcggcacgttgctggtccgtcattatcactacgatattaggtttatctgtctgtgcaaacaaagacaaacctattccctggagaacgattcctgagaaaagatgttttctaaaattcataactatctgattttaattaataaccatataaaaaacgacacatactccataacccctataaagagattatgaagtatgcagagactcaatcacatcaatcccaacccggattctgcaccatattaggattcatttgcatttctctcgccggtatcggaagactccagtaatgatctcctccccaggcataattattagttctggttccccatatctgagtcataccattcatcttgccttctttgtccttatagaacttcagatctttccaggttctccagcgaatctcatcgaaataaatcacgtcttcacctattaattcccaatggcgttcgttcatgatacgctggtgcatatctgtttttcctgtaacctgagtaaattcgttggttcccagtaattgggctcctgccctttcgcgcacctcattcactttgcttatggctccgggaagatcattcaactcattcaatgcctccgcccaattcaacagaacatccgcataacggataaacggcaaatccaattcagaatatatattcggtaactctaatccttcacccacaaacttacgatttaagtaatagaacttcaaacttgtatctgttttcaaatccccatatgtggtataagaacggaaaggataacgcatcacatactctttaggagttccttcaaccccaccaagaaaagaggcataaggggttataacggacattgccattctcggatcacggttttcataggcttttttaatcctctcctcgttaccggaagcatcatatttggacatatcagcccccgcagctactgcgttctttctttcagtctccgtgatgttattccgcaggaaatacaccatacgcttatcaatgcccatatcattatatccggggataatgtcatcccaattgaacttactaccgtctctattttcgtaagactcggcaaactgcgggtttataatataattattccaccccaatccattgcctgaagggtcgggcggcaagcatctgttaccgaaacctctgttcttcttctgcgtataatccggatggtccagacattgcaaagagaatatcatttcatcgcaacgctcattttccaccttaaacagtttcttgtatgactcctcacccgcacctttatagagcgtgtatccacaatcctttactgcctgaaaatcatcagccgcctttttccattctttcatccacagatataccttgcctcttaaagcataggctgcaccttttgtaatatgcccgtaattggcatcatccgaactgtatttatccggcaaatccggattattgatacaggaagtcagatcatccactatatatccccagacttcatcctgagtggaacgtgccagttttgcctcatcaatatccttaatcggatctttatagtaaggaactccattatacaagatattcagcctgtaataccaccagcaacgcagaaacatacattctgaaatatagcggcttcttttagtctcatcaaatccctcgaccgtaggcagattgccaatcacatcatttgccttgataattcccttatagaatctttgccagggagcagaactccctttaacagagctcggagaatttgtcgcaaataagaaattgaaagtaggagctatacctataccgtaatccatagtactggaccatatatcaaaccacccgttggcaacatcgctataatccacatacaattgattatacacacccgctatcgtctgttccgccaaggtaggagtcgaccatacattcccttccgccggctttccattgggtgacaaatccatatctacgcaacctgcggttgacattcccacaaggaccactgcggccatcgttttcatcagatttcttcctttgtttatatttatcttgttcataccatttaattttagaaagtaacatttacaccaaaagcatattgtctcataggagcatagcccactccactcatcatttcaggatcaatacctttgaacttagtaatcgtcaacagattctctcccgaaacatagacacgcacattttgcatgcacaccttctgtacccaatctttggggagcgtgtagccgactgtcagattcttcagtttcagataattgccattatgtagaatatgctggccggaaacacttacctgagctgctttatccatggtgagacggggatttgccgaagtaagatttgtccgcgggtcattcggattctcaggatcgtaaaagtaatggtcataagctacatctttacccattccatacccaaaccaggttatactgctattctcaccagactgataccagttgattttgaatccggcagcaccagcccagttcatagagaagtcaatgcctttccatgacaggtttgtctggaagccgaagtaatacttcggtgttttagaataaccctggaaatccttgtcatcgtcgtcaccataaatgccatctccatccaagtctgcataaatgatatcaccataccagatattactcttgccgattccctgtttcggatagaacttatatccggcatccgtcatggcctgcaaccatttcatatcatcttccgtacggatcattccgtcagaaggccctcctttcggatttaccgtaccatcggcattaaaatagtttctattgcctttatatacgttcagcacataaaattcattgatcatgtgcccttccaaaacacgctgcaagtctcctgttgaaacctcacccagattggtataataagtggaactaccatccgcattctgctgccatccgcggaccagttctcctttgtatttggttacttcattcttgttgtaagagaagtttccagatatgccgtacgagacagaaccgatccgatcattccaacctaaggttatttcaagtcccttattagtaacctctgcaatattctgtcggggagaactgaacccagacaaagtaggtgacaaagtcggattatacaagataccgtccgtcaacttattataaacctccactgttccactcaaacggtttttcagcatagagaagtcgatacccaggttggtaaccgtagttgtctcccattccaggttatagttggaaaaacttcccatgcccagtccgggaacctccttgttgccaaaagcataatggggagccgtagcataaacagcctgccattcatagttaccgattgagttatttccgagttgtccccaggaaacacgtagtttcaggttgtcgagccaattcagcttcttcatgaatttctcttccgacaaacgccaccctgccgaaaaggatgggaatataccccagcggttctccggagaaaaacgggaggaaccgtcataacggacattcgcctcaaataagtaacgggaatcatacgtataagtaacacgaccaaagacagaacgggatgaaaactctgtagtgcttccatcgatataatcaggctccgtcaatgcgtcaaaatctgtaagactggtatcaagcattcctttcttactaatgtcggtagtacgtgcccatttgcggaattcctcatagcccactaaggctgccacatcgtgtttacctttgaaaatctgtccccagtttaaggtggtagtatttttccagctctgatttccatcaatataatatttcacagggtactccgcaagcaattcggaagtaggaggaacattcatagtttctccacgttggaatgaaaatctttcctgataatcggaataatgccacagattctcctgccgataatgatcgtagtagaagttagaagtcaaatggaagttcttaaggaaatcaatcttaatataaggattcacaaagaatttcgttgttttataaaagcctcccgcactattcagataataggccggattgttaactaccggatcttcttcgagggcttcgggagctccatatttcccatcgtaatacggataggttcccggtgtacttttctgcatttgcaaaccattcagattatcaacattatttctttcctgatctacatgataaccccatgcattcagccccacagccaagaaactggcaacctgtgactccagattactgcgcatataatatttcttcattcctgaattcaccaccaaaccgggattatccacatacgtagcattcaggctataccgggttctcttttccgcaccggtaagcgtaatagaatgttcctgcatcaatttcggattatacacctcatcgtaccagtccgtattcggataggccacataattcgggtagcccgattcggatattccattcggattgctggccgctgcacgccacgtatcaatggtagtttggctaaacacctgtgcctgccctgcattgtccgaagcctcattgataaattccatgtagtcggcatagtttgaaaccatacggatcagattagccggtgtattataggagaattttcctgaataggtcacgttgattttcccgtccgtacctttcttggtagtcaatagaataacaccattagcaccccggttaccataaatagcacacgaagcggcatctttcaggatggagatagaagcgatatcattaggattgacattattcagcgacatttccattccatcgaccagcaccaatggtgcagaatcatttaaagtacctgtaccgcgaatacgcagagtagatgattctgagttgggcttactggatgtctgcatcacattcaatccggccaccatacccgataaagtagaagcaagcgtagttacgggacgcgacaaggtcttatcatcaaaattaaccgtagcaacagagcccgtcagattcacttttttctgagagccatagcccaccactaccacttcatccaacaattcgttatcggacatcatcctgatgtccaagacactctgattgccaaccactatcgactggcttttatagccgatatacgatatctccaagacatctcctgtagccacagacaatgaaaacttcccatcaacatcggtcaccgtacccatagaggctcctttaaccagaatgctgacaccaataagagcctctccggtatctccgtcgattatacgtcctgtaatgttccgttcattttttgtttgatccgccgaaaggatagatacgtgcaccgtttcatttgccaaagaagacgatcccaccgcgttcgcagaaagactccccatatatataagcgaacacacgaggaattttgtatttacctgcataagatttaaagttttaattaaacatcattttttgttttccataaaaccggttcttcctgatagtttccggatactaacaagctgaatccagccattcaaaggtagcgcttatgtgcaatttccgatagaacgaaaaaatcattttatagaataatcgaggcaaaaaggtattagtagtgtatccggctatacctctgacacagatattgtacaaacaggtcttattcttgcatacagaatacccgagatgtacttgctccgtatcaaatccgtagtttcttcgtccagaggtacttctgagcaaagaatgtacggagcaagtacggctcagatacggcttagatacgatttaaatatcccactacttcagttgaaaagttgttttagagatcaagaatcaaacgcggacggaactccgcttccagtatttcccgctgacgggcatcagctacaaataaaccggtcgacaaaacttcgcctatggcaccattgtccgtaaccaccgctacttctcttttcccttccaccggttttccgttccggggattaataatatgttttcgctcatgcgaatcattaccggaagtagtgaggcattcattctgaagaagcaactcctgtggtttcctcccgtttggaacagcgccctgtccaaaaccgaccttccatccatcagccaagggatgatgccccaaagccaatacagaactgtttcccatattgatcaatgcatccttcacttcataatattgcagcaatttccgtgttttttccaaagcatatcctttcaggaatccggaaaggttgatagtcactcccggttgcaaaaagagaagggtatgctcctgaggtgatagttgaacactacggattaaattgggtgtataatcagccgaatgaatagttacatcaaaacatccagcggtacggatatagcaatctacacagaaagtaagcatatcataaagctcgtggctgacctgttgcggatgtgtagaagcagtccggttcaaatatgccagttcactatccgcatcataatagttggccatcttttctaaacgacacagcattttgtacaccgcatcgactaccgacagtaaaatgtcctccccttgcctgccacacagtattatatcgacacgtgtatgcatagatggaaaccaggcataaagcaagccaccctgagaaggtgaatatttataaagatgtttaataacgtctggcattttcaagtctgtgtttcctaaagaaaaatgaaagggcaagtcacaattctgcaactcacccttttcaaagacatactattaattacaactctttgatctttatattcttaaaccaaacttcatcgccatggtcttgcagaagaatgtttccagactctgaattaccgaagttaggccaatctctatacttgctatatgcaaccagtgcatcccacatctggttctgacgtgtgtattcgatgagcttcacaccattcagccaatgctctacgcgatcacctttcacgataatcgtagccgtattgaaatctttcttgttgaaaggtttatctgccggagcaggaatcaaatcgtaaagtgaacccaatgtacggtttcctttcacgcccaatttagcatcaggatgcttatcgtcatcaagaatctgaaactcgcaaccaatagccgaaccggctcctttattcatatcggggtttatgaaatatttcactccactgttagcgccttcagtaatcttgaaatctactttcaggataaagtttttgtattggcgggtagttacgatatcgccaccgttagcagattcagcaccaccactcttcatcactttcaggatgccgttttccattttccaacccttttcagggaaagaattcaatttggctcctctccaaccttctgaagtcttaccgtcccaaagaagtgtccaaccttcttttgcttcgttcggagaaatggtattggggataacatttatctccggagctttccggtctgtctggtagcgctctacgtctgttgtacaaatgcggatattcttccaactgactgtttttccttcatcggcagcattaccgatagcatgtacctgcaaagcaataaaaccggcaggagtcatatcgtcccaaatattggcacaaggcactccattgatccaggtagcgatagaattacctatagcctcgatacgagccttattccactcattgttcttgaaagcacttttagctgccggattttgtgtcagcggataaagccagttgcgacgggcctcatcatagatgccacccgaccaggcacgcttagagggatcaatctcaaactgatagccgtgcacgcgtcctttctggtagtctttcttgctttcactgcgcagctgcacaccagaattcaagccatcatctactttgaaatcaaactccaggataaaatcaccatacgtcttctttgtagccagaaatgtgttaggtgttcccatcttcgaaatgccgacaatagcaccatctaccactttgtattcggctttaccattcagcttcttccagccactcaggttcttcccattgaaaagcggctcccagttttgcgccgaaaccacagatgcacaaaacacaaacaaaagcaacaaataattctttttcatattgatatttcttctattgattatttaatactatgcaattacagtttatagaactcatcccatcctttacgaggcggtacgccggccaacattgcattcgcaaactcattatttgtaatctgcttggtgcgaggatcaaagaatatttgcgtattgagacgttgagcaatcactcctaatgagaatacctgccccagcacaccgttaatttcaaacggtgagcgggtcttttcctgtcccatacaagccaacaggaaattttcgaaatgattcgacggactcttaggtacttccggcagtttacctgccatttccttagctttctcttccggtattatggaaagtgtgctgccatgacttccacccttaaatatcaaatcctttgtataaataatctttccggggttcagactggaggccggcgtatctccctggttagttgcaggaatattaggatctaaaccggataccccataaccggcagggataggaggaagattgtccagaccatcataccatgtaatgtcaaccggcggcatacccttacgttgagggaaacggaacaggatagtggaagaataagggaagaaatagtcattatgtccgttggcatatttcatagacacttcgtagggcaatcccaattccaggaattcgtgaaccgtatccaggatatgtgcaccccaatcacccagacagcccattccaaaatcgtaccagcagcgccactgtcccaaatggtagtctttgttatattcgtgataaggagttactcccaaccaggcatcccactccatgtctttcggcagttgctggccggaagggaacttatagatattggtatcccatttgtgccagcgacggggattattcatgtgtgccgtcacagccgttacatccttgataataccggcatccatccacgccttgaactgaaaatagttagcttccgaatgtccttggttaccgacctgtgtagccaggttcggacgtttcagtgcagcttgcatcagcaattctccttcatagaaagtacgtgccagaggtttctccacatacacatgtttacctgatgccaaagccagcatactgatagggaaatgtgaatgatcgggagtagctatggctaccgcatcaaaatcattgcccgccttgtcaaacatctgacggaaatcgcggaagcgtttcgccttaggatactggttcatcactttctgggtgtgagcggctcccatatccacatcgcacagagccacaacttctaccataccggtacgggcaaaatcgtttataatctgctcgccacggtttccaatgcctatataggcaatcttcactttatccgtcactttcctttgcgtagtggaagcacgggctcccagcacatcaccggctccgaatgccagtccggcagaagccattgtcatcgttttcaaaaaatctcttcgtgtcgtcatatatcattggtattaattaagttactgagtcttgatcatcttcaggccgcatttcttttcttcaaaaacagacttcttatcccatagaatagaatgcgcaggattgtccaaaagacataaagcacgcccgaaaacgcgaggacatagaaaaaggatgtcagcatctccgagaaaggtgtctcataagaaattatggcatacagatttgccagattgcctataatgaagcacgccagcaaagtcagcagttctatctttttccggcgggcagtaatgactgtatttttcatacggcttcaggtgttttagcttgatgattcaagtagttgattttatattcatcggggaagtataatacccgttcttcctgtaaagcctgatcgcccaacaggcaaagcatacttgcataatagccctcttcagctatgcgttctggctgcctacgggtaataacagcctcaacaaaagcttctaataacaaagaagtgccatccgatttaggtcgttctcccagaataaattcccctttgttttcattggcagtttccggtgcccagctagttccggcaaaaggtaaggaatcaaacactttattctcccagtcgttaatcatctgcaaaaatccaggtgcaggaggaacactttcaaagaagtatttacctttctccggttccaccgtccccagattacccatgatttgttcttccaaaccatagaatttattggatatgacagaatcaaatgtcatcttcactccgtcatcgaacacatatatgcaacttacattatcatatacttccctaccgtccttccaataggtgatagccccatgtcccatcactttctcgggaagcttttgcagtgcccagctccctatttgcaactgatggcaagccagttcagtcatcagtcctttggaatattcgcgatacagacgccagttaatcagacgttccagatcaggtgaaggtacttcccgcctccagtctccattccggttccaaaaggtacggatggcgtttatctcaccgaaagtaccggcatgaatcatttccatggccttaatgtatcgcggatcaaaaagacgttgctgcccggtaaagaatactttctccgtactgatgtgcttattatagatgcggaaacattcttccatcgtaaagcctatagatttctcacagaacacgtgcttgccggcatcaaaagcatccagcactatttggcaatgggaattaagaggagtagctaccagtacggcatcaacggttttatcttccagtatttcccggtaatcgtcataaactttagctttcggagccagctccagtgctttttcaatagaaggctgatagatatcgcacaatgccacaatttctactttaggattctgtaccagaaagctcatcaaaaaacgtcctcttgaacccggaccgataatagccagacggcacttttcaccggatgtttctacaacttccgaaaaagcagaaagccaagggcttgccgatagcagcactccggctccaatcatccctatatctttcagaaactctctcctgctgatcaatgtatctttcataatataatctttaaaataaagcctatttcccgtcttttactgaaggcggaacagcgatataaaatgacagtccaaaaatagcaaaatattgagatatagagtataaatatttatccaaacaatacgaaaatagtaccaatcgcccctgttgtcactttataaagtccttaggcagaactccaaactgcttctggaagcattttgtgaagtaagaaggggtattgaatccagtcatgtaacacacttcattgatcttacattctccttcctgcaacagctgtgccgccttcttcagacgttccagacgaatgtaatcattcggggtcaaatccaatatcccttttattttccggttcaggctcgaacggctcatattcagcaggctcgccatatcatcaagacagaattcaggattttgcatattggccacaactacttctttcaatgttttaagaaaggtttcgtctgctttagtcatcgccatactgttagcttgtacaaaaggagaatgagcaaaagaaacccgcaacttctcgcggttactcaacaagttagacacacatactctcaggtattccacagagaacggtttttctatgtaaacgtccgcaccaagcctcataccttctatttttgcctgaagggtggttttagctgtcaataatataatgggaatatgactataatcgagctccgacttcagatgttcacacagttccaatccatccatctcgggcatcataatatcagaaataaccagattgaccgtatgttctcccaacactttcaacgcttctataccattgacagctgtcagcacctgatattccgatgacaattgtttagtcacaaacaaccgcatctccaaactatcttctacaaccaacagggtataccggcattgtttacgaccggtttccggttctccttctccggatgattcttcattcattaccggttcttttcgttctattgtaacagtttgtacatgcttcaacggaagtgacaacaggaaacaattacattccatggaatcttccatgtataatgcaccttcatgcagttcggcaagcaaacgggctaatgccaacccaataccggtaccggatacagagctcaagactccctccttatactggatgaacggcttaaaaatctcttcacgcatttttgccggaacaacaggaccgtcattacaaaccgaaaacaacagtttatcttcttccacatacagcctaacgcggatataagtttcagaatacttgatggcattggaaagcagattactgataatcttggtcaagccttccttatcgaccgaagcatacaccgtttcgggagagtcaataacaaattccaattctttctgacgtgccgaaagtctaaaacgtttacacgtcttttgcaggatatccgacacatcacattccacaaaattcagttggaatccttgcgtctccgtttttctgaaatcgagcaactgattgaccaaatcgagcagccgatttgtattcaggtccattatctccaaatcatccctgatttcatcggataccgatttggatgacaacacattctcaagcggactctttatgagtgtaagcggcgtacgtatctcatgagctacattcgtgaagaaatctattttagccgtgtacagttccctctccttctcacgctcaaacttctccatggtctgctgatgcttctgttgggtccttctcctaaaatagaaaataacggcaaccagagaacataaagccaatagtacataaacgacataggcccaggtagacaagtaaaaaggaggtagaatacgtattttaagcacacgttgcgcttcattccatttaccgtcgctattagatccctttatacgcaacgtataacttccgtaaggcagattggagtaattgatcatggagttcctgcctaccgtataccattcactgttaaaaccctccagcttatactctaaccgattcatctcgggagcctgataacttaaggcagccacctgaagagaaaaggaattctgattggcatcaagctctatttcatctgaataagtaatgctcttctccataggagaatccggactatccactgataaccgcttgttgaacaagtaaaaatcagtaatgaccaccggaggaagaaaagtgttctctacaaaagtttctgggtcaaaagctataaacccattgatactgcccaggtaaatacgtccttttctgtcacaatatccggactggaaattaaactgattgctcaacaatccgttggccgtggtatagacatgcttgctctctgtctccggattgaagcagacaagaccgttattagttgtaagccagagatttccccgcttatcctccaccatcttatagatagtattacttggaaaacctttcgacatatcatagcgggtgaagttatccgtctccggattataacggcagaagccctcacccaaggtcataaaccacagacattttctgctgtcttcatagatactgatcaccttattgtaagagagcgaagcagagtctttttcattcgacaggtaatttttccacttctgacttcggacattatagcaaaagactccattggagaaagtagcaaaccagagattgccgttgaaatcctccaatatatcataagtgaacatgctcttcagttcagcaatgcgtgtaaagtcgtcagaagagcggttgtatttcagcagaccggccgttgtaccgatccagacatcgcctgtagtggttttgcaaatggtaaaagcatcattagcggacatagagttctgagttttacctctggaataatgcttcacttgcctggtatgcaaattcacccgatttaacccaccggaaaaagtgcccacccatagatcatctccatccagacaaagtgcatgaacatttttgtaaatggcaggatgatcaaaaggcactattttaccgttcacaggatcataattgaataatcccttatcttcggtacctatccacaacgtaccgtcattgctttcgcatatttctcgtacccgacgcccgaagtgtctgagatcatctcttggatagaatttctcaaaataagtccattgatatggataatagttcacaccaccgaaatatgaacctatccacataccattttccttgtcacgccacagtgaataaatggcgttatccgacaatgcataagaatcatcctgatcaggaaccgacagatgtgtcaccttatcatttgccagattgtatatatacagaccagattccgtacctacccacagctcatcatcggatttgaattgcaatacgcgtacataagcgttcaacaatctgcgagttttgccggtggtaaagtttatctcagtcaatccgttaaccgaagctatataaacgcaattgtgcggaccactgacatgccagttaatgatatctcctttaaatgtctcattgccatctgcatccttaaaaggttgtagcggactttcaaaattatcctttgtgtagtaaagattgtcagcatacaaagccaaccagcaggtactttcgttaagccagaaacgagctacattggacatgcccgaatcatgcagataattccgtaaccttttctcatggttgtagcaaaacaagccctgattctccaccgatatccaaatattatcgtattcatcgcttccaatcatggttacgaagtctttaatgacagttcctttatcacttgtctgattgaaagctgtgaaagaatcaagcaccggattatagataaagactcccccatccgtccctatccagatattcccttcatggtcttcataaagtgcagtaatgaaattcttgcctaaaccggaattttcctttttgtatacgcggtaagatagaccatcataacggttcagaccgtctttagtcccaaaccacataaagcctttcctgtcctgcaaaatctgatataccgtattttgtgagagaccgttccggatgtccattgtcttaaaatagtaatgaacagcattttgtgcatatgacggcaacgccgtcaatatgcacaaataaaagaaaagctttataatcgttcggttcataacctcctccttcccggaagattactttttcaacgaattacagatacgtgtatttatttctttagcacgcttttcatccagtttaataaccttacggtcataggtcatcaggccattcacttccacttctacgtcagtagtctgtgtatagacagctgcggagaatcctctgtctaccatcttatacagcatatcggcatacttcacatattcatccgtagcttctttggaagaattaaactgaacataaccccagttacggttcggctcccagatatgatccttcagaacaagaccgatgccaccgtattcacccaaaacagttgcacgctgagcatcatacaagtacatctcaggtgccggataattatgcaggtcaagcatatcaccacaagtataatggttaccgccacttgctggattcaccaaacgggtcggatcatattgtttcgtccattcagcaatttcaacggtcttaaactgtccccaagcctcattaaatggcacccaggtaccaatgcaaggataagaatacagacagtccattatttctttccattctttgcgataataagcttccgattcggctgaacgcttcatttccgtaccatcaaaatacttccggttctgccattgcgggttgcggtcaccactcggcatgtcttgccacacaataattccaagctggtcgcaatatgtataccaacgggcaggctctactttaatatgtttacggatcatattataaccaaaatcttttgtcttctgaatgtcgtacagcaaagcttcatccgtaggagccgtatacagaccgtcaggccaccaaccttgatcaagcgggccaaactggaacagcgcttcattattcagttccaaacgcacgataccattggcatccctgcgagtggaatatttacgcatggccgcatagctatccaccttatccacaatcttattcccctcttttaaagtaactttcaaagtatagagaaaaggagaatcagggctccacagttttgcattttcaggcattgccacttctacaggttccccattaatactcttaccggcagcaattaattgattaccatcatacacattcacctccacgaagtctgatgtgccgttggtgttcagttcagcttttaccgttaacagatgacggtcaatatcaggagtaatacgaagattctcaatatgtttaccagcaacaggttccagccatacagtttgccaaatacctgttacaggagtgtaccagataccttccggtctgctgacttgcttaccacgtggttgagggcctctgtccgtagggtcccaaacctttacaaccagacggttgctgcctttagccgacaaggcaggagttatatcaaaggagaatggagtaaatcctccggtatgacttccaaccttaatatcgttcacccatacatcggttttccagtcaacggcaccaaaatgtagcaaaacctgttttcctctccaggctgaaggtatctcaaagctccgctgatagattacttcctgattttcgttcactctttttcctactccggacaaagacgattctacagcaaaaggtacgagaatttggccttcaaaatccgttggaatgcgtccacctttatcaataatagcataatcccacaaaccattcaggtttttccagtcattacgctccatgatgggccttggatactcgggcaatacatcggaaggattgatctgctctgcccactttgtctttattctatctccggccggtttccattgagccgaactctccaaaataaaaaacgttactaaaaataacgagatgaataattttttcatggtatgtaactctatttaatgtttggaagcaaagttagctacaaattcattttcagaataacgcaattgactcaataaatgcaataatctttccatttattcgctaagatagaaagatacacaagaaaaacataccaatttgtgagatccaatagcaaaaaataaagaagatgggaaattatagaaaacaagaggttaacaccttgcaaagacttaattctcaagaaaagctccttttctatcaggtaatctgtcgtttcaaagcatttgcatatccctcgataatcaattccaacccatccgttaattcttgtggtgaaataacaatctccaattttcccaccgtagcattttctgatatttttttattagggaagctgatctgtagttcatcgtttataacttccaaggcaaattctgccgtaacagtagccttctctattttagaagccgtaacaggtaccaatgtgattaaagggacctgaactgttgtagtagtaactgctccggtatcatccaaagcgggatattcaagttgcactatcttcggaaccaatgcccctttatttttcccctccccgtcaacaggcttttcaaaatacttatccagcaaaccttcattcttatccatcagtgagtcgctggcacttacaatggcatgatggatagcctctacaaacaatttaaagctaatcatatcgatgagttttatgattcgacattatgctattttactttttctgaggtgccatcttcttcaacttttcaaagttgtcgaccgcctcactcactactgagcgactttccgacgccaacccaatcgccgcttggcaattagggcatgagaattgcacaccttgaattagcaaatgcaaatcaatgggtatttgagtcctacataccggacatgggatatattgatctatcatacttctattcttctttttccgactgtttatctatcttttgtatgggctgtatcgattttgtatacaaatcaagtaaagtcaatactcctttaggcaaaggtaatctgcccgcatgtatattcactttaagacggctcgacaaagtactatcatattgttcacggaagtttttcttatattcctgtttggccggagcaattcttccattcagaaccgccttcttctctacaagctgcacacccgcatttacttgcgatttataatcataagaacccaccgatgtgatttccagatcaaagtccacattgatcttatctattgcaagagaatttaaaggcaataagcacagtaaaggaacctgaaaagccattttgttgatagagatgtatcccggatcagtgggttgtttcgtatgatcaacaaccggctgactcagtaccatctctatcataagaggttgtcgcaagttgcttccctcctcttttgtgaagcaataatcaagcaagaactgagcctgcccggtcagcatcataacattggctttcgaggccgccaccaaaggtgcgccaatgattgattcaatgttaagttctgccccaaattgaggtttgaatgtaccttgctcgttttcagacataatcgtttatttcgacttgatattaaactttcctgaccattctatcattcagactactttcagggtgctggaggagtaggagtagaagaggcaggcgtcaattctataggctgaattgcttgcgtaaatgcttcgataatagtgtttactcctttaggaagtggcaattgaccagcatgtacatttaccgtatatttggcagaattgctcttttcataatgtgtattatgagtagcagaatcctttgaagaataactggctgatccttttatagatacagatagcggtccccaacccaatttagtttcaaagctaccggaacctgaacttgcgctttcagatgttttgttatcgtcttcagagaaactggattttacttccatttcaaaattaatatccacagtttccacagctaatgaattaattggcagaatagtcaaaagaggcaaagtgaattttgtagaagcaggggtaacagaaacctttccatctttatcctctgaaataacacttctagtaagaatcatatcaatcatgataggctcatactgggtcggaattgttttcccatctttatcctccttcgccatgttgaaacaagtatccaacataaacatcgtttgcgtaagagccattgcagaattcgccttagcggctgcattcaaaggacctccgattaagctttccattggcagcccggagaattgctgcgacatcgacaataaatttgtatccataataatgcgttttgaagaagttattaaatatgttaactaaaactcagaagtctcttaatccatctttttatgcattcgaataagcgagcaaaaaatccttttttcctctcaggcttttccgccggataaaaactaatagtaatgcgttcacccatatgcctttcacatttatcccgattcgtaatgtgacaaagttagtgacataaaagcataaaaagagaatataagtgataacatctaattttcacaattagctatttatcacttacttacaaagagaagtaataacaatcttcaaaaagcaggctaattagcaaccttcaattttatccgatgcctcctttgagccacaatttgcttattgacattcccaaagcaaagagcaatggtaaaatcatctaacccacaaattgagaggcatgaaaatagacaatcatcttccgtatatttaggataggtttggtgcagatactctatatagtccttgtatatctccataatagtagaacgaagtttcttctgctcattttccaataaaatacgtaaatcctgtttgtttttagtcttgtcttgacgactaagccgttctattgttttataaatggatgtctctttaaagatcacattgcataattgcgccttttcatcggccaattttctgatttcattttctttttgagaaagcagtttttgagtttcttcttgtttatccctcaataaagaaatataatactcagtctctatcgcatgtacttccaataaagcctgatcgtatttatgctcctgttcgagaaacttcttccgctgctttgtccgctgaatataccagaccagaaaaagaatcacgagtaaacagaaaacgatcagatagataaatggaaactgcatcttcactttaaaatattcggttatctgacagcaaagaaaataaaaatatagagaaatagcaatatatatttcaaaaaaagctgactcataaacctacatggttcatttgatccgctacctctttctattctgttacccgcagaagcacaacactcacattatctctaccacctgccgcctttgcagcttctatcagattgattgcagtaggttcttgatgaagaacttcttcaatctgatcatctgtaagcatatcacttaaaccatcggaacaaatcaaaaagagatcttcatccaataattgaccggttaattcggtgaaatcggcaaaagcagatgttccggcacccaaagagttatatattacgttggatggagtagtcatatctccggtcagctcccgcatagaatggtccgacgaaaattgtttcagaataccgccacgataacgatacaggcgactgtctccaatattcaccatatagatgcgctcttcataactgaacatgcctacaaaagtggttcccattccctcgtattgaggaagttcaacgcccttgtttgttatcagagcatgagtttcattcacccaattctttatctcgccggacagtacctcatgggaaagatcggaaggaagatcggtaataaaacggtcgaatgcctgggtagccaactcactggcaaattctccaccttcgtgtccgcccataccatccgctacaaaagccgtaaatcgagcctgaggaatgagttcaaacttctgttcgtatgtttcgtcacgataaagtcctccattgaaaagtatcatgtcttcattattggtacgtatgcaccccatatcactggcaagctgacatttcaataataacataaggtaattttgcgatttaatgattacaacctacgattaaaatgatctctattccatccaaatctattcaaccttaaaatcaagattggctatacgaacgatatctccgatgctaaacaccgcaggtacattcggcgaaagacggttaccgtttacaaacgtaccattggtagaatccagatccactatttcccattgtccggaggtgctcttctgtaagcgggcatgggtaccggaaacatatccctgagaagcgaatgcagatacataatcaccctttctacgcccaatcaccgcaccatttcccaaacctaaacgaatgcctgcggcagaacaaaccaagcgtacaggaagtggaggtacggatactcccggacgcattgtcttttcaggctcaaagggagccggactcacagaagaagccgaggaattcacggaagaagtcgaaggatgcacaggtgacaccacttgatttgcagcggatactaacggctgaccgcattgcgtgcatcgtttcccctttccaaacacatggcattgagggcaaatatacagttcaacaccacattgatcgcaatagtaactatcactttctatttcaactctgcacttggggcagttgactaatgtactcatttctttagtaattaacgattagtgattcaattatcccatatcctcaggcaacaatatactgtaacttgccggatcaaagtcaggacgctccatttcgtgacgaagacgggaactctgattctttttcacccgatcgaaataattattcacttcacgggcattggcaaaattacgttcacgacgattatataaatccgtgaagtaaacacgcatggcattttctgcttcaggagtcagtgtgagcttatcctttttcaccttcatcctaaaaatttgcgccaattcatcgggattatagtcctcaaaatgaatcaccttggtaaagcgagattccaaaccggaattcgtatcaatccattgccggatctcacgcggatacccggcagcaatgcaaaccatcttccccttataatcaagtaacatcggcaaaatggtattcgtagcctcctgcccgaagttatcgcccatcagtgaataagcttcgtcaataaagaacacaccgcccaccgcacgcttcacaacccgtgccgttttagtggcagtctgccccacatagccttctaccaaatccttacgggttacttccaacaaacgattgctgggcaatacacccaatgagtagaaaatatttcccatgatacgcgccacagtagtctttcccgttcccggattaccgacaaagagatagtgatccactacaccctggaatttcttacccatagcttccgccttagcacgctccactttgatataatcggcaatctccttcacttcacgtttcacgctggataatccgatcaattggttcaattcagccatacactcttcttcatcgatcatctttggcggatcatacggaatatcctccgcctcgatggtcaggtacatttcgcgagtcaaggtctgtcctccggcatgtaattgtgccagccgattggcacggcgggctttggttttctcaaagagtttcaccatttcccctgcatttccaaagttctcatctttcgatgtcaccatttcatcgactaacttaatcagcatctcttctgcatccggtgtcagtatattccctttcttcctgataagagaacgataaatacaaatcaactggtctgccgagtagtcctcgatatgcagaaaattactaaaccggcgccggaagcccggattggcattattgacaaactcctccatttcagcgcgataaccggcacagataaccacaaatttcccggcatccttcaccattcgggtcattagtgcctccacggcttccactccagtctgatccttacttccacccgcactgataggcatcagagcataggcttcatctataaaaagaataccacccattgcttcgtcacaagccttatccacaagtttggccgtctcattctgatacgtacttatcagatgtttacgctccttttccacgactttatcggtaggcagcagaccgatggctttaaagacctctcccaacttacaggcgatggtggtcttacctgtccccggattacccgtcagcacaatgtgtacaggagtcacctcagcgtcagcaatacccatttccatcatttccttgtccatggctatcttgttcgccaacgcacgtatctctgcttttacgctgtccataccgacgaattcattcaattcagcaagtacaacgtccagactcttgatatttttgctttcttcaccttcaatatcggcacgcgtcagtacatgcaccatagacgcatcataatccggtgtacccttcagttccagcaaccggactccctgattcttgattgcacgatccattgcgttccgtacctcacgggcattaccgaaattgcgtgtacgggtcaggtacatcttcgagaagtaattacggataaatgcctcggcctcttcatccagggtcagatgctctttcttcacctgtcggcggaagatttccgtcaattcatcggctttatagtcgcggaaagtcaccgtttcattgaaacgggaggccatccccgagttggaactcagaaattctcccatctcttttgtatatccggcagcaatagccacaaactgcccgcgacgatcttctaccagtttcagcaacgtatcaattgcctcctggccgaactggtcattatcaccttgcttcaatgtataggcttcgtcaatgaatagtactccgcccatagccatatccacatatttttccactgccaaggccgtctgacctacatatcccgcaaccagctcctttcgcgaaacttccaccaactgaccgatgggcagcacttccagagaattcaggatatcagcaaagatgcgggcaattgttgtctttcccgtccccggattgccaaggaacagaaaatgatctttgacctcccgctttgctccggcacctttccgttcccgttcaaaatctatcttattaatgattttctgcaccgttgccttgatttcatcaataccgacaaactcatccagctctgccatgatctcctcataactcttctgccggaactctttaccgggaatatcctcaggaatagcaaccgatgcattcggatcgcgcttgatagtattggcaaagatatcagccgcctttttcacagccaaatgcccattcccgaaatcatctgatttctgtcgcatctcattcttaaacacacgttccaatttagcatccgcttcctcactcaatgcaatcccataacgttttttgagttcatggatacaaagctgcttcagttcctccatactgaaatctttcagatcgaagtaatactcaaagcgattgcgcacatcaggattggataccagaaactctttaaaggccgatgaaagcccggaaagaatgactatcggatcattgttccacttatccatacagctgaacagcttatcaagcttattgatatcattggctgcacccgaaggcaaaagcttctgcacattttcaatgcaaagaatcccccctttcagatcggcagtattcttttcccactctttggcaaactcctcataatccactgcatccactactttcatggcaggcttcttgataataccactggaatacaatagtttttgcaatactcctgccagtttggttttaccggttccggtatttcccgtaataatcatgtccatgcccagacgaatggaaatgccactacgctgtgcacgcaaagcgagcgactcacaagtatttaccaaatcctgcaactggttcttgacggtttccatccccaccaactcacgcagcggttcggtagctttagtaaccacattggtaccacaccatttgcagaaaacagccttttcacggttcggcttattacatttcggacaattcatagtcatcttcatttatcagttctctacatctgctttcgcttttttgaaactgaagttcacttgttttttggtcgtataattctcataagtaccttcaaaagcatccattccatcgccggtgaacgtaccgttatactgcccgtcgagagtaccgttcttgtatacatcgtcaaaatggatagtattcgtaacggtattcacagtgcccgtcaatgcttcgttggtcagattcgtatattgcacatgtatggtagctttcaagccttccgagtttgctgtcgttatgttcagcgtagcattacgcccttcaaacgtaccctcccatgtacctaccagttctttaagctttccatcgttttgcagaaaacgggaggcatccagtccgaatgccggagtatattgcacaaacaaataggccagccaacctaccaccaccatggaaagtacagcacgataagaaaacttacggatacaatctttcagatatttagcatattgtgccgattcaccgccaatagaagactcaaagtgtgtccccacactcgccttaaaagcaaaatgcaatggctccaagcctgtttcctcaaaaccgggattcagcaaatgatcatgcaacctccgctcaaccggaagcttgaaataacagcttttcatcagataataagccagtaggagcaaaagtccagccagtacataatgagcatagggcatgatgagatccagcacaaaatagactgtataatagataattgcccccacaataaaacctaaaatagcacttccgataagattctcaaaatcagaagttacaaaaataagaataccgaagatgatacccatcgtcacaatggaaccgacagagaaaccggacaacgggttttctgtaaacggaagcccgtagaagcataatgcaaccgcaaaagccaaaataggaatgaaacacagtattcccagcaagacacgcatcaccgtcagcgtcctacaacgtaaacgcactttccgcaggttcttattcacaaaattggtggcaatacggaaattggaaacatctgtatctttactatctattttttcgatgaattcgagatatttcaccgtttcctgctcgtatgcgaatttgggagaaagattcttcaacggattctcctgaaagaaagtagtaagccagtctctcaaatatccactctccagttctgccttaacttctttcgatggaatggacctcaatccgtccaaatcggttatactcttatcactatccttgaagtaataataaggtaaagcactcaatcccttgatcatcttgaaagtagctattatccagttgtaaggacctgctttccggagattatctttggatttcagttcaaagcaataatttatccattcaatcttatcctcatacacacccttagacttcagatagaaatagagccgcgaacctttcagacttgagagcataccgagaatataatcggcatattcatgatccggatcattcttcggtgtattcttgtaaaccatcaactgttgattgatgaattgggctatttgagtatgtgtgaaataataattatttgctgtctcgtccatttgcagggtgaaggaaactttaggactcaaattataaagtacaccgtaagttaccgcagcatccgatgtactgaagcctttcaattgagtacgtatcttccctaccaatcctttatcacggcctgccaaccatatcaggaaagactcttctgccaaatcattccacgagtcggcactcaacatatgattataagcataatgaagaacttcttccggtgtattacaacgccccaaattccccttttcatcgatcaattcataaggacgtgaaggatcaagttcatagatcaaacgccataaagcctccctttggcgaccttttttattaaacaagggagctgcattatccgtaagccgcttcagatcgtgcgcattaaaaaagagaaacaggggatcgttcgcattcgccaaggtagtctggtaagtgttgaaattctcaatgagagattgcgctatttcttcggcggtagtccgcggacgtcccttgacatcataatagggcatatccacattgagcgtataacaggcggcatacagccctgcagtctggtctttcggatagcgcttttccacaatatcttcgatttccgaaaccaattccggccgctgattatcattcagccatttagtaagcttaccggtatagagatattttatggcaagattctgatcctgtcgcataaaatcagccaattgttcgggtgaatgtgctatctgattctttccggcattaaaaataatactgaaacgacgtttactttcctgcccgacaaaatcactgaatacatcctctccccgagcccaacgaacgatttcggtaaatccacaacgtttttccggctgaggtgcagtcaatgcttttattaattgcagcgttcgtcccgataaatccgcaggaaaaggcaaatcccccgtgcgtttacgcttcatcagttcaaattctctttctttaaactctttctcgcccatccacagacagagcaaaaccataccaagagagtaaaaatcgctcttcgtatcaatctccacccgattctcaccgggaaccgtataatacatttcgggagctgcataaatgcgggtatgagcctggtccgtacgggcaactccattctgatcgcatcttaccgaaataccaaaatcgcccagcagtacctgattctgattctcatcggcaaaaaagaaattacccggctttatatcccgatgaataaacccatgcttatggcagaaatcaatggcggcagcagcttgtttagcaatttcacaaagccttctttcgtctcctttcagatttattttatccaaagagcctcctttacagtaagtcattacttcataatgcctcaattcaccggaaacacgcggattatcccactgaccatgatctatgatatccactaataatcccgagcgcggagtttgtcttataatttcaagtatctgatgattaggaggcggctcaataccaacataatagagctttagtacgtactgctttcccttactttccaccagaaagatctgagcttctcccgtcccatccgagattacctttataaccctgtaattcagtcctttaataagatattccgtatcatgctggcgagtgatagcctcaatcgccttttgctgttcggcacgtaaggtcgcatcatctgacgaaaccggacgcaacgtcttatcctccattccaccgggatacagagttttgtcaatgttagctacaccagggcgcaaggtcttcttactatcatcttccgggcgaagagttttttcttcttcaccagggcgaagggttttctcggctttcagggcagggcgcaaagttttatcaccgtccgcactaccgggacgcagtgttttatcactgtctctcaagtcgctcataattctatatagttttaagattagccaatccggcaaggcaccctgaaggatcaatcatcctgatactcaaaggtttttgtaacagtcaccacatcttcatatacccaagtaccccccagttccggctgggcacactcacttgggtgactatggtggcaaccgcagaggttacatatccagcaaacaggcgcttttgttacggatttccgcaaaacaggcaatttccttgccgaatagtaattccgctgcatctgtggcgtcatatctccttccggacgaagtttctccatcagtaacttcatctcttccagtttctctttataagattgctttgcttcgtcaagatctaccttcttcacattcagttgtatcttcggacgagtttgaacaggttcctccactttcggttcaggtctggcaacctgcattccttcaagagaaccgcttcctgaaaagagatctttatattgttgtatcagtttcttatcggcttcactcaattctacagggggcagttccggttcccccaccggaaattcttcagagacagtattcagtatttgttcttccaaatcggcaagttcctgcgccaatgccagcatttcctgaaagacggggtctttcttcgccttctgcatttcctgcattgccatctcattcagaggacgattacattttcggcaaaaactgcggaaattaagggtattgcagtcaggacagataatccctgtgcgaggattaccacaatcaggacagaagaaatcatccgcttccatcgaggcaccgcagaatgagcacaattctgcatgaagcccttgtccgcaatgagggcatatttcccaattaggctgaacaggagagttacaacgcacacatgaagttcctttaagcgccatgccacattcttcacagaatttatcaccactgtgacaaggtgtcccgcaattaggacaacattgcggctgttccgcctgtttctccgaagtcttctgctgcgcctttatctgttgttccgataaagattgatgttgctgttccataaaccgtattcagactataagttgaccatccagattttaagtttccaaatatatcaaattatttgcggaatacgatggcggcagatagaaaaaactcttttttgtattagtaatgagttttcaccacagagtaacacagagtttcacggagttatattcttttgatttcaaattgattaaactctgtgttactctgtggtgaattaattcataaccctacaaaagtgcataaaacataaccaacagaaattcaactcatattctggatattagctatatacatcggacgcgcagcatctatatatcgaacatgtcgcatctatatatcgggcatgcagtgtctatatatccaataccaccgatatatagatgctaaaagagcgaaatgaaataaaagcattcagtctttccaatacagatgttcctatatcctcgaaaaacagttctccaaatgccacacttaagcgtttgaaatgccacatctcggtaaccggaatgccacacttgaagaagtgcgaagtatggcattccgggagtttaagtgtggcatttaaggtactcagatgcggcatttcaaacacttaagtgtggcatttcgggtacttatatatcaaagctgagcgctaaataaaagttgatgtgatttaccctcactactctcactcttgaaataagcggttgatagactaaatgttaagtgtgagtgagagtaaattttgggcgtgagggtaagttccctaccctcacgcccaaaatttcatttctacagatcaacttgctataacacaataagatatcccgtatttaacgtagataccgtataggtccgtaatccggcatttttagctttttttccccgcatagacggcggtatgtaaccctttccaaggattattctcctataaatgtatagtttctgtagagttcatggggtgatcattgcctgaaattacattgcttgttatggatgagaacaagcaatgtaatcacccacaacattacttgtaccggatcacatcattacttgttttcaggtcaaatattcttcaaatgactatgcctggatttactttacacttttgttttgatatatactgcttttcttcacagttaaaaaatagtcttcctgtttaagtttacatcttggattttacgttcctgataaacttcacacattcccctgccggttataaatatatacatcttctatagatgtgtatttttccatgacccaattagccattaattatatatccgacaaggaatattatgaaaaacaccacgatggtttgccttagcggctggaggcgtgaagcctccaaagagcattaagctgctgcgctaaccctcatttccttgggtgttttcatattaaatgataaagtaatactatctcgattctcctcctttcgggaggaggagtacccgaagggggaggtggtaggtgagaaaagaattccttatttatatggttcataggtatttcttgctttacctaccaccccgccctctgggcacccctcctcccaagaggaggggaatcgagatactctatttacttaatattggaattatcatttaattcataacccgtcagaaagaaagatttcacaagccactaaccatcccttaaacaatgataagaaaaagaaaaactggatgagtagtagtttttttcgtaactttgcactgttttaaagacattgaatgaatggagtttaaatacgacgttatcgtgattggcgccggacatgccggttgtgaggccgcagctgctgcggcaaatctgggttcaaaaacctgtcttatcaccatggacatgaataagataggacaaatgagttgtaaccctgccgtaggcggtattgccaaaggacaaattgtacgcgaagtagatgctttaggtggatatatgggattagtgaccgatcagaccgccatccagttccgtatcctgaaccgttccaaaggccccgcaatgtggagcccccgtgcacaatgtgaccgcaataagttcatctgggcatggcgtgaaatcttagagaatattcccaacttgcatatctggcaagatacagtacgtgaaattctcgttgaaaacggagaagtggtaggcttaaccactttactcgatgtaaccttccgtgcaaagtgcatcgtactgaccgccggcactttcctgaacggattaatgcacgtaggacgtaccaaacttgccggaggacgtatggcagaacctgcatcttacgaattaaccgaatccatcgcaagacatggcattgaatacggacgcatgaaaaccggtacgcctgttcgcatagacggacggagcgtgcactatgaatacatggaaacgcaggatggagaatgtgactttcataaattctcattcctggataccagtgtacgccacttaaaacaactcccatgctggacttgcttcacgaacgaggaagtacaccgtgtattacgtgaagggttgccggattctccccttttcaacggacagattcagagtatcggtccacgttactgtcccagcatcgaaactaaaatagttactttccccgataaggagcaacaccagctttttctggaaccggaaggagaaacaactcaggaactttatttaaatggcttctcttcatcactcccgatgaatatacagatagaagcgctgaaaaaggttcccgcattcaaagatctggtgatttatcgtcccggatacgctatcgagtatgactactttgaccctacccaactaaaacatacgttggaaacgaagaaaattaaaaatctattctttgcagggcaggtaaacgggaccaccggatatgaagaagcagccgggcaaggaatcattgccggaatcaacgcacatataaactgtcacggcggtgaaccatttacccttgcacgagacgaagcatatatcggcgtattaatcgatgatttggtaaccaaaggcgtggatgaaccttatcgtatgtttacttcgcgcgccgaatatcgcatcctgctacgtatggacgatgcagatatgcgtcttaccgaaaaggcatggaaactcggactcgtaaagagcgaccgttatgagttactgaaacggaagcgtgactcgatcaatagtatcatagaattcactcgtaactattcgatgaaaccggcattaatcaatccggttttggagcaattgggtaccactccccttcgccaaggatgcaaattgatcgaccttataaaccgtccgcaagttacgcttgaaaacatggcggagcatgtcagcgctttccgccgggagctggataaagttactgaaagaaaagaagaaataattgaggcagctgaaatcctgattaagtatgaaggatacattggacgtgaacgaatgattgcagataaactggctcgtctggaaagcatcaaaataaaagggaagtttgattataatgccattcaatccctatccaccgaagcaagacagaagctagtgaagattgatccggaaacgatagctcaggcaagccggattccgggcgtatcaccaagcgatataaacgtattactggtactttcgggcagataaagcgaatacgttccacgtgaaacaaagaattcaataaacgcattaaaaatactgattatgagcaaagaaactcttgcaaaaagcattcgggaaattcctgatttccctattccgggaattctattctacgacgtaactacactgtttaaagatcctgcaagactccaggaactttcagatacattgtatgaaatgtacaaggacaaaggtatcacgaaagtggtaggcattgaatcgagaggcttcattatgggacctatccttgccacccgcttgggtgcaggtttcattcctatccgcaagcccggaaagcttcctgcagaaaccattgaggaaagctacgataaagaatatggcaaagacaccattcagatacataaggatgccctcaacgagaacgacgtagttttgctacatgacgatctgctcgccacaggtggaacaatggaggctgcctgcaaactagtacaaaagatgaatccgaagaaaatatatgtaaacttcatcatagaactgaaggagttgcacggaatagacttattcaacaaagacgtagacgtacagtcggtactttcattataaacaaagagaagagacctgagaaccacatggagaataaccctgaacttaaaaccagcgaatatctgaaaggaattgtattgaaccttccggagagccccggtatttaccaatatctgaataccgaaggggttatcatatacgtaggtaaagctaaaaacttaaagcgaagggtctcctcctatttcaacaaagaacacgaaccggggaaaacaagagtactcgtcagcaaaatagccgatatccgatacattgtggtgaactctgaggaagacgccttgctgctggagaataatctcatcaagaaatataagccacggtacaatgtcttgttgaaggatgacaagacatatccgtccatttgcgttcaaaacgagtattttccccggatattcaagacacgcaaaatcatacgcaacggttcctcttactatggcccttacagccatgtaccttccatgaatgcattgctcgatcttatcaagcacctgtatccgttacgcacctgcaacctgaacctttcacccgaaaatatccgggcaggaaaattcaatgtttgtctggaatatcatatcaagaactgcgccggaccttgcgtcgggaagcaatcactggatgattacatgaaaaacatcggagaaatcaaggaaatcctcaaaggtaatacgcaggaaatacaacggatgctttttcagcaaatgcaggaactggctgccgaaatgaagtttgaagaggcacaaaaggtcaagagtagatacatgctgattgaaaattaccgtgccaagtcagaggtagtaagcaatgttctgcataatatcgatgttttttccatagaggaagacagcgatggcaaatccgcatttatcaattatctgcatatcacaaacggggcaatcaaccaggcttttacattcgagtacaagaaacggttgaatgaaaccaaagaagaacttatccaactgggcatcattgaaatgagagagcgatacaagagcctttcacgcgaaatcatcgtgcctttcgaggtggatatggagttaaaagacgtgatctttacaatacctcagcgaggggataagaagaaactgctggatctttccattctgaatgtaaagcagtataaggccgatcgcatgaagcaagccgaaaagctgaatccggagcagcgcagcgtccgcttgatgaaagagatacaggaagagttacaccttgaacatttacccatacaaatagagtgttttgataactcaaatatccaaggctccgatccggttgccgcctgcgtggtattcaagaaagccaaaccctcaaaacaagactaccggaagtacaatatcaagaccgtagtaggcgcagacgactacgcctccatgaaagaagtcgtaagacgccgttatcagcgcgctattgaagagaaagcagccctacccgacctccttatcaccgacggtggaaaggggcaaatgggcgccgtgaaagaagttctggacgaactaaatctgaatatccccattgccggacttgccaaggatggcaaacaccgcacatccgaactgctttatggctttccaccgcagactatcggtttaaaacaaaatactcccctgttccgattattgacgcagatacaggatgaagtacatcgttttgccattactttccaccgcgaaaaacgcagtaagcgacagattgcttccgagttggatgagataaaaggcattggagaaaagactaaagcagctctgctaaaagagtttaaaagcgtaaagcgcataaaagaagcatccctggaggcgcttacgaaggttacaggagaagctaaagcaaaagttattgaagaatattttaggagttaacccctacttctacatattcatacatacaaattgcaggcaatcacgaatttattcgtaactttgcatccggaaaagtttttaaaagattaggataaaaagaacatgagagtagtcatacaacgtgtcggacacgcttctgttacaatcaacggaacatgcaagtccgctatagggaaagggcttctgatattggtaggtattgaggaaacagacggacaagaagacattgactggctttgcaaaaaaattgtcaacctgcgtgtctttgacgacgagaatggggtaatgaacaaatcaatcctcgacattaacggtgaaatactggtaatcagtcagttcaccttgcatgcttctacaaagaagggtaaccgtccttcatatatacgtgcagcaaagcccgatatttctgttccgctgtatgaacagttttgcaaagatttgagttttctattaggcaaagaaataggtaccggagaatttggtgccgacatgaaggtagaattattgaacgatggccctgtgaccatctgtatggatacaaaaaacaaggaatgatgacattagaagaagctcagcatcaggtagattgctggatcaaaaagtatggtgtacgctatttcagcgaactcaccaatatggctgtccttactgaagaggtaggtgaactggcaagagttatgtcccgcaaatacggtgaccaatccttcaaagaaggagaaaaagataatatcgaagacgaaatagcggatgtcctctgggtactactctgcattgccaatcagacaggtgtaaacgtcactgaagcgtttgcccgcaatctggagaagaaaacccaacgggataacacccgccatatcaataatcctaaattgcaagaccatggagaagaatgaacctaaccagaacaagtatgatgccgcattggcaaagtacaacacacagctggacgatacggaagtagctgcccaggtagcgaaaatcattgcagaaaaagtgcccggaaaccatacggaggaggtcaagaaattcttgttccactgcattgatctcactacactgaacactacggacagcgatgaaagcgtgatgaaattcactcaaaaagtaaatcagttcgacgaagaattccctgatttggagaatgtcgctgctatctgtgtttaccctaacttcgcagaaatcgtaaagagtaccctggaagtagaggatgtaaaaatagcctgtgtttcggcaggttttccttcctcacaaaccttcacagaagtaaaagtagcagaaaccgccatggcactgatggaaggtgcagacgaaatagatatcgtaatttcagtaggcaaattcctgagtggagactacgaaaacatgtgcgaagagatacaggaactgaaagatgtctgcaaggaacatcacatgaaagtgattctggaaacaggcgctctgaagagtgcttccaatatcatgaaagcctctatcctatccatgtattcgggcgcagatttcataaagacatctaccgggaaacaacaacccgctgcaaccccggaagctgcttatgtaatgtgccgggctattaaagaatattacgataaaaccggcaataaagtaggtttcaaacctgccggaggcattaataccgtaaatgacgctgtcatctactacactatcgtcaaagaggtgcttggcgaagaatggctcaacaaccaatggttccgcttgggcaccagccgcctggccaatcttctgctttcggagatcaaaggcatggaaatgaagttcttctaagagcttccataccataataaaaactaaagaagcttgataggaaaagcgaaacttttcctatctttgcgacaacataagccaatagagttttggctaaagcattgtattagagaacgtttcatttattacctttttcctggaattcggcaaaattcaatctatgaaaggtaatgagcaaacgggtctcacgcactttcgtgtatatactcttgttatatatcgaataggcgtgagactgttgcttgtatttcatagaaggtttgccgaagcctcaggaatggtacaagtaacagttctcacgctttttgataacaaacgtaaagataagagtatggaaacaaattcggcacccctcttccatcggaatccacaggcacctcctgtgaaccgaaatcgtgaacaagcccttctcatcggactgatgagcggagagcaagagtttttttacacaaacagtctgactacgggaagaagtcgtgaggagctatcccgacatctttctttagccgtaagactaaaagacaaacctaacattcaactggtatttaactttctcaaagaggaaggagaacgcagcgcatacaacatcatgatttctctttttctatcggagcataacgaaaaaaaacgcgaagcactcatcaaagaacgctttcttggcatcgatcgcttcgtacaatattgcagaaatctgagtgacttcctggtgtacatcaaagagaataacacaatcgaaataaccaatgaagacctccaacgaggtatattagcatgggatttagggcatctggtaagtctcgcccgcgtatcttatgactatggacttttagccgaagaagaagcctggaagtacatagaatttgccggtaagaaatgccgtgaaacattcgcttgctggaaagagataggcaaaagcttcctgttaggacaaatcatgagctatcccggcgaagagaacttccaggaagcaatccgctatttcctgctttcgacggagagtcccgaaagcccttgggtaaaatgtaagtttggttgattatttatcgcggtccactacataatccaaataagcagcaaggccggcttttacatctgaatcaggcaaggacgccaataatgaaagtgctttttccttataggcaaacatggtctgcactgcatattcaatgccaccttgttgcttggcaaattcgattaatcgggcgatttcatcggccgaggcagtaccatttttcactttgacggcaatctcttccgcactttcatccttggtagagttcaaggcataaagaacgggaagggtcagtttgccttccaacatatcgtttcctgttggcttacctatctccttactatcataatagtcgaatatatcatccttaatctggaagcaaagaccgatatattcaccgaactggcgcgcaaattccgcctgttcatcggtcactcctaccgagagagcacccgatttggtacaagctgcaaagagcacagccgtcttcttacggatcacatcaaaatagatttcttcggagaattggagattacttacattagaaagttgaagaagttctccctcggacaaattctgtcccagacgggaaaccacatcaataatagcgtaattatgcgtcttgcctacctgcacaagtgcagttgccaaaaggtagtcacccaccagtaccgctaccttattattataaatagcattcaccgacagctgtccgcgacgctcggtgctttcatccaccacatcatcgtgtaccagactggccgtatgtaataattcaagggaaaccgccgcatgaagtgattcgggacaaatccgtccatatagctttgccacaagcagcagcaaaatcggacgcatcatcttcccattcttttgtcgaatgtgtgagattacttcattcagcaaaaagttggaactggtaagcgaattgtcaaacagctttttgaaatcgtccagttctgccgctatcggagtttttatgagtgatgagttgtccatgcatcgctattttcccacaaaaatagtaataaaacacttaatacggtatttttttgtacttttaccatgaaaaaaaggataaatatatgaattctgacgataaactgtttcttctcgatgcctatgcattgatatatcgcgcctattacgcgttcatcaagagccctcggattaactccaaagggttcaatacttccgccattctgggctttgtaaataccctggaagaagtacttaaaaaagagaaccctactcacatcggagtcgctttcgatcccgccggaccgaccttccgtcatgaggcctacgaacaatataaggcacaacgtgaggaaactccggaagctatccgcctttccgtacctattataaaggatattatacgtgcataccgcattcccatcctggaagtagtgggatacgaagctgacgatgtcatcggcacgcttgccactgaggcagggcaacaaggcatcaccacttacatgatgactcccgataaggactatggccaattagtatctgaaaatgtattcatgtaccgtcccaaacataccggcgggtttgaggttatgggaatagaacaggtaaaagctaaattcgacattcaatccacccagcaggttattgacatgctgggattaatgggggatgcttccgataatattcccggatgtcccggcgtcggagagaaaaccgcacaaaagctgatcagtgaattcggcagtatcgaaaatcttctggagcacaccgataaactaaaaggtgcattgaagacgaaagtcgaaaataaccgggaaatgattatcttctccaaattccttgcaacaatcaaaatcgatgttcccatcaaacttgacatgaaagctctggttcgtgaagaaccgaatgaagaagaactcaggaaaattttcgaagaattggaattccgtacactcattgaccgtgtactcaagaagagtagttccccctccccttcttccgttgctcccgatcttttttcaccaggcccgctttttactcaaaataacggtccggttcaaggcaatttgtttgaagaatttgcgtccaacgggccggaagattccaaaaattcaaatctcgcgcgtttagaaaccatcaatgccgactatcaactcattgatacagaagagaaaaggagcaaaattattaaaaagttgcttacaacgaaaattctctcaatagatacagaaaccacttcagccgaaccaatggaagcagaattggtagggatgagcttcagcgataccgaaaatcaggcttattatgttccggttccggcagaacgggaagaagcgttaaaaatagtaaatgagttccggccgctctacgaaaatgaaacttcaatgaaagtcggacaaaatatcaagtatgatattcttgttcttcaaaattacggtatggaagtgaaaggtgaacttttcgacaccatgatcgcacattacgttttgcaacccgaacttcgtcataacatggattatctggcagaaatttatctgcattatcaaaccatccacattgatgaacttatcggcccgagaggaaagaatcaaaagaacatgcgggaccttccaccagaagaagtttacaaatatgcatgcgaagatgcagacgttactttaaaactaaagaatgtacttgaagaagaattgaagaaacagggggttgaacatctcttctatgaaatagaaatgccgctcgtacgcgtacttgccaatctggaaagtaacggggtgcgcattgataccgaagcgctgaaacaaacctccgaacatttcactgtccgcctgcaagagatagaaaaagaaatctatgaactggcagaggaaacgttcaatatagcttcacccaagcaggtgggcgaaatcctgttcgacaaactgaagattacggataaggcgaagaaaaccaagacaggacaatacgtcacttcggaagaggtgctggaaagcctgcgcaataaacatgagattatcggaaagatcctcgaataccgtggattgaagaaattattaggaacatatatcgatgctctccccctgctgatcaatccacgcacagggcgtattcatacttcttttaaccaggcagtcacagctaccggacgactcagttccagcaacccgaacctgcaaaacattcctatccgcgacgaagacggtaaggaaatccgtaaagccttcattccggacgatggttgcgagttcttctccgccgactattcacagatagagttgcgcattatggcgcatctaagcgaagataagaatatgattgacgccttcctcagtggttatgatattcatgccgccactgccgctaaaatatataaggtagatataaaggacgtcacttccgacatgcgtcgcaaagctaagacagccaatttcggtatcatctacggtatttctatctttggattggcagaacgtatgaatgtggaccgtaaagaagccaaagaattgattgacggatacttcgaaacctacccgcaagttcgtgaatatatggataaaagtattcagatagcacgcgaacaaggatatgtggaaacgatcttccaccgcaaacgtttcctgcccgatatcaactcccgcaacgcaaccgtacgcggatatgcagagcgcaatgccatcaatgcgcctatccagggaagtgcagctgatatcattaaagttgccatggcacgcatctacaaacgctttcaaagtaacaatctgaaagcaaagatgattttacaggtccatgacgaactaaatttcagcgttccagaggctgaaaaagagtttgtgcaacaaattgtaattgaagaaatggaacgcgcatatcgcatgcacgtacccctgagagccgattgcgggtggggaaagaactggttggaagcccattaattccacctataactttatttaacttacaatcagaaagcaactgaagtaatctgttcgaaatacagtttgctcaccataatatccggcaacatcactgccggatatttttttgtcatcaatcttggcaaaaagaaagcataagaaagcaatcataactgacattttgactatttttaattcatatatgatatttatgtcaattaaatacgtacctttgcagcgaattcaatgacatattgatagaatatagtaagagataacttaaaaacatatagaaccatgagaacaaaagtatttttaaaaacagttgctttatcagcagttattctttttagtgctatggcagcttctgcagctaacaaaaacaaccttatttacaattcggaagagaaagacggaatgatggttgggcaaaccgtttacaagatggacagtggaactttagcaaactacatgaagtacagctacaagtatgatgaccaaaaacgtatgacggaaagcgaaactatgaagtggaacagccaaaagaatacttgggaaaacgacctccgcatttgctacgcctatcagggaaaaagtatcactaccacttattataaatggaacagcaaacaaaaagcatacgtccttgtacctgacatgacggttacaatggacaatccaagcctgtaaatcttacagatactctcttaaaattctaacaaattgaacaaaccgaaacctttataagttttgtacaccaatgaaagccggaatacgcgatgtattccggcttttttcataactttgcctttcaaaaaaaatatctatttatgatacctgccaacctcacccactacattgaaacagaaatcattccacgttatgagaagttcgacaaggctcataacctctcgcacgtacaggccgttatagaagagagcctttcacttgccaaacagtatgatgtaaatgaaagtatggcatatactattgccgcttaccacgacaccgggctttgtcatgatcgtgctacacatcacctaatctcaggtgagattctgaagcaagatgtcgctctccgccaatggtttaatgaaatagaaatagaaacaatgaaagaagcggtagaagatcaccgggcatctacggaccatgaacctcggagtatttacggaaaaatagtcgcagaagcagatcgcgtgattgaccccgctatcactctacgccgcacggtacaatacggactgaaacaacaaccagaagcagataaagaatggcactatcaacgttttcatcagcatttaatggacaaatatgcgcctggaggatatctgaagctctggcttccagactccaagaatacagaacgcctgaaagaactacaaactattatcctaaacgaagagttgctcaaaaaaacattcaacaaattattttcagaagagaaaaacaattaaacctccaataatgaaagcactttattataatgccatacttggcatattactattctttccctcatttttgaaagcgcaaatcagaccttttgaaccacttaatccagacaggatattctttaagggaaaggttgtggatacagataacaacgctctccccaaggtaagtatctacatacccggaagtatgcgtggaacaatttcagactcaaacggaaatttctacatagatgccaaacctaaagaaaccctatactttacctatgcaggaaaagaagatgcatacagacaattacaggagaaagatactaccggcttcatagtacaaatgcaaccacgtattcaaagattgaaaaatgtacatgtaagaaaagataagaaaatcattgaaagacatagggcaacattaattaaaacctaatcttttatcagataaacagaagaatacctatctttgcagcaagaaaataagtaataacaaaatagataatggctttacaatgtggtattgttggtttgccgaacgtaggtaaatcaacacttttcaactgtctgtcaaacgcaaaagcgcaggcagcaaactttcctttctgtacaatagaaccgaatgtaggtgtaatcaccgtacccgatgagcgcttgaataagctcgccgacctggtacatccgcaacgaattgtccccactacagtggaaatcgtggatatcgccggattggtaaaaggtgccagcaaaggtgaaggattaggtaataaatttctcgcaaatatccgagaaacagacgctatcatccatgtgctgcgttgcttcgacgacgaaaacgtgacacatgtagacggaagtgtaaaccccgtacgtgacaaggaaatcatcgattatgagcttcaactgaaagaccttgaaaccatcgagtcacgcatacagaaagtacaaaagcaagcgcagaccggtggagacaagaccgctaaactggcctatgacgtactggtaaagtacaaagaagcactggagcaaggcaaatcagcacgcaccgtagtctttgaaactaaagatgagataaaacttgcccgcgaactcttcctgctgacttccaaacctgtgatgtacgtatgcaacgtagatgaagcaagtgctgtaaaaggtaataaatacgtagatatggtacgggaatccgtcaaggatgagaatgccgaaatattggtggtagccgccaaaacagaagcggatattgccgaactggaaacttatgaggatcgccagatgttcctcgaagaagtaggactggaagagtcaggtgtaagccgcctcatcaagtcagcctacagcctgctgaacctgcaaacttacttcactgccggtgtacaagaagtacgtgcctggacgtatgaaaaaggctggaaagctccgcaatgcgccggcgttatccatacagactttgagaaaggattcattcgcgctgaagttatcaagtacgaagactttctgcaatatggcagcgaagctgctgtaaaagaagccggaaagctgggcgtggaaggaaaagaatacatagtgcaggatggcgatatcatgcacttccggtttaacgtataatcaattacaggttatgaaatatctcatagccggtacaggcggcgtaggaggcagtatcgccgcttttctttctcttgccgggaaagatgtgacttgtatagcccgcggcgaacacttgactgccatacgcgaacatggattgcgtctgcactctgatctgaaaggtgaacatacactaccggcaaaagcatatactgccgaagaatataacggcagtgccgatgtcattttcgtatgtgtcaaaggctattcggttgattctatcactgacctgatcaagcgtgtatcgcataaagacactattgtcatccctattctcaatgtatatgggacaggcccgcgcattcagcgccttgtacccggagtaacggtactggacggctgtatttacattgtcggtttcgtatcaggtaaaggtgaaattacccagatgggaaagatattccgcttggtttacggagcacataaagacacggttgttccccgtggaacgttggaggctgttcggcaggatttagaagaaagtggcatcaaagcagagatatctccgaacatcaatcgggatacctttgtgaagtggtctttcatctctgccatggctgttaccggagcttattacgatgtgcctatgggcgaagtacaaaagcccggcaaggttcgggatacattcattggtctttcagaagaaagtgccgctttgggccggaaattgggtattgagttcaaagaagacattgtggagtataacctcaaagtaatcgacaaacttgccccggaaagtaccgcctccatgcagaaggatatagccaaaggacatgaaagcgaagtacaaggactgctattcgatatgattactgctgctgaggaacaaggaatcgacattccgacgtatcggatggtggcggagaagttcagaagttgaaacaataaacttaataaaaaaatatattatgcttccattactcagcatcaattgggacccaaatcccgaactattcaatctgttcggccatattcccgtacgctattacggtctgttatgggtcatcggtatcgcctgttcctatttcgtagtccgctaccagtacagagacaaaaaaatcggcgatgacaagtttgaaccgctgttcttttactgctttttcggcatcctcatcggagcacgcctgggacattgcctgttctatcagccggaatactatcttcatcatttctgggagatgatattgcctatacagttcctgcccgatggaggttggaaatggaccggctatgcaggtctcgccagtcatggaggcacgctggggctgatgatagccctatggctgtactgccgcaagatgaaaatgcactatatggacgtattggacatgattgccgtagcaactcctatctgcgcctgcttcatccgccttgccaatctgatgaattctgaaattatcggcaaagcgaccgatgtgccttgggcatttgtattcgaacgagtagatatgcttccccggcatccggcacagctttacgaagcaatcgcctacttcattttcttcctgctgatgattttcctgtataagaattacggcaagaagctgcatcgtggtttcttcttcggactctgtctgacagaaatttttgtattccgcttcttcgtagaattcctgaaagagaatcaggtagatttcgagaatagcatgtcactgaatatgggacaatggctcagtgttccgtttgtaatcataggagtgtatttcatgttcttctacggaaagaagaaaacacagaaataaaagaaaaatgaggatgtatcagacacgattctgatgcatcctcatttactatttacgttgccacttactcttcgaggcatgctcccgcttcagaatatcacttaagggaacttcaaatatcttggcctcaacccatgccacaaaatcgaacttacgtaaaataagcaaaatgattctaccttcagattatacccttagtttttggacatttcccgcttgatagaacgaacttcggagtggatgtagtctacatcccccaactcaattacaccaattcacacggattatctgatatgattcatttttaatctgtgcaaatccgtgtagcctgtctccccctactcttgctttatgtttttgtgacacatctatctatttttatgccatttcccctcaggaatacatttatgtcgtgaaatcatatatcatatctgacacataccggtaactttgcaaacagaaaaagatatcataggtaacaaaacaaataggtaagaaagattccaaaacaggagaacaaaaaacaggtagttcagacttaaaactactacctgttttctaagaaaagaaaaatgaatatacaaacatacataactatttaaactaagaatgatgaattcaaaacaaacgcttttcagtctattaatgtgtgtactggcaatagcaggttgcgacacgcaaaaacaagctatcgtgggcaacgaacttgccttaacacgagctaagcaaacattggattctttatacctgaactattccgtttccggtacatgcctgttacgtgaaaattacccttccaatatcggagagtacacagcaacctatctggcatctgaggaacaaaagaatatgcccaatctctattcttatttatggccctattccggaaccttctcagccgtaaatgcattattcgccactacaggcgataaagagtacaaatcagtactcgacaataaagtactggtaggtctggaagaatacttcgatacccggagaactcccgaagcctatgcttcatatatcaacagtgcaccgcaatccgatcgtttctacgatgacaatgtctggttaggcatcgatttcaccgatacatatatgctcactaaagaacccaaatatctacagaaagcacaactcatctggaacttcatcgaaagcggtacggatgataacctgggaggtggtatctattggtgcgaacaaaggaaagaatccaagaacacttgttcaaatgctcccggctcagtcttcgcattaaagcttttcgaagctactaaagacagtgcttattttgtaaaagggcaacgcctctatgaatggacgcaaacaaacctgcaagattctacagactatttatactttgataatatcaatctgaacggaaaagtcgacaaagccaaatttgcctacaacagtggacaaatgatgcagtcagccagcctgctataccagttcacgggccaagagaagtatctgactgatgcacaaaacatcgctaaaggatgccataactacttctttcaggactatacaccggaaaacggagaaccattcaaactattgaaaaaaggagatgtatggttcattgcagtcatgctgagaggttttatcgagctctatcaagcggataaaaacgaaacttatctggactctttcagtaaaagtctggattacgcctggggacatgcacgggatgagaaaggactgttcaacacagacttcagcggaaagacccaggataacagaagatggttacttacacaagctgccatggtagaaatgtatgcccgccttgcagccatcaaataataagaaaaaaatactaatacctaaaaacatgaaaaagagaaatatcggtttatgcgccgtagcgttgttctgcatgcacaacaatgccaaagccatggaagcattcctgaaacaggacaacaccacagtggtgaatcatgctcagatagccgctgcctacaagacaaaccgtcctgccgtaaaaaacagactctacacgtctaaagctgtagaggccgaaatcctgcgggtaaaaaagttactgaccaattccaaactggcatggatgttcgaaaactgttttccgaacacactggataccaccgtacattatcgtttgctggatggtaaacccgatacatttgtctataccggcgacatccatgccatgtggttacgtgattccggtgcacaagtttggccatacgtacaactggcacataaagaccctgaactgaagaagatgttagaaggcgtaatccgtcgtcaattcatgtgcatcaatatcgatccttatgccaacggatacaacgatggccctactggtggcgactggatgtcagatatgacagacatgaaacccgaactgcacgaacgtaaatgggaaatagactccctctgctaccctctccgactggcttaccaatattggaaagagactggtgatgccagcgtcttcgacgaagcatggatagaggctatcaccaacatcctgaaaacgttcaaagaacagcaacgtaaagacggtgtaggttcttataaatttcaacgcaagacagagcgtgctctcgacacactgaacaataatggtctgggtgctccggtcaaccctgtcggactcatcgtttcctgtttccgtccttcggatgatgccaccacacttcagtttcttgttccgtcgaatttctttgctgtatcttccttgagaaaagctgcggaaattctttcaactgtaaaccataacagctctctatcccaggaatgtacagctttggctgacgaagtagagttggctttgcagaagtacgccacttacaatcatccgaaatacggcactatttatgctttcgaagtggatggtttcggcaaccatatgctaatggatgatgccaatgtgcccagtctgctcgctatgccttatctgggtgatgtggacgtgaacgatcctatttatcagaatacccgccgcttcgtgtggagcgaagataatccctattttttcaaagggaaagcgggagaaggtattggcggtcctcacatcggatatgatatggtatggcccatgagcatcatgatgaaagccttcaccagtcaggacgatcaggaaattaaagaatgcatcaagatgttgattaatacggatgcaggtacaggttttatgcacgaatctttccacaaagatgatccggcaaactttacccgcgcctggtttgcatggcagaatactctttttggagagctgatactgaaattggtaaatgaaggaaagcttgaattattgaacaatatcaaataaaaggagaagtcaatatgcgtaaattaataatagtaggtttaataacttttgtacccatttgggtatcggcacaaaaagcatttaagaattggcctgaaggtgtatctcctaaagagataggtgaattggtcagcaagcgttttgtagaagttccacaccccaattttaatggcaatccagctccccccaatgaaatcacttatcctgagacatgtgcctggttcggcgctttacgttatgcggatataacccataataagagactgctccggcaactggaagagcgtttcttacctattttcggtccggaacgtcatttgcaaccattacctgaccatgtagatcataccgtattcggaactatacctttgcaactatatgcgcagacaggtaaggagatttattatcacatgggaatttggtatgccgatgagcaatggaagatgcctcgtaaaacaaagcataaagaagaatatcaaacattgctgaatcaagggttgtcttggcagacacgctattggattgacgatatgtttatgatttcagctattcagtcccaagccttttttgtaaccaaagaccgtcagtacatagaccgtgccgccgcagagatggtgatttaccttgataaaatacagcgaccgaacggactattctaccatgcggaagatgtcccgttcttctggggacgtggtaatgggtggatggcagccggaatgacagaacttctcggacttttacctaaggataatccgaatcatgtccgcattttgaaatcatacaggaaaatgatggatactttacgccaatatcagaaagaagacggtttatggggacaattggtagatgacaaaacgacttggacggaaacatccggttcggctatgtttacctatgcaatgataaaaggcgtaaaacaaggttggctggatgaggctgtctatactccggtggttcgaaaagcctggattgctttagtagggcatatcgatgaaaacggggatattgcaggcgtatgtgaaggtactaataagacgaacgatcgtcagttctacttgaaccgccgtactttattgggtaatatgcacggacaggctcctgtgttgtggtgcgtaaatgcatttttggaaagataaccctctaattatagaaaaacaatgatacataagtattttacacctgtactgatagcactattgtgcatgtacggaggaaaaatttctgccaaagaaatcagtgtactgtcaccggacggtaaactgaaagtgaatatagagttaaaagacaaaatatactactctgtatattcgggtagtgacctgctactgagtaattgttcattaactatgacgttagacaatgaagtactagggaaacaaccgaaattgaaaagcttgaaacgtagcaagattaaagaaagtgttaaacgggaaattccactaaaaaatgcaattgtagagaatcattgcaatactttacgcatgaatatggcaggaaattatgccattgagtttcgtatttttgataatggaatggcctatcgtttcctaacggacaagaaaggtgagattgaagtaaagggagaagatttcgtaatcaactttccggctgactatttagcccatatgtctcaacctaacggctttaaaacatcctatgaatatccatatacacatatacagactaaagagtataagtcgacgggccgtatgagctatctgccggtactcttagaaacggataaacaatacaagatactgatatcagaagctgatttacaggattatccatgtatgttcttgaaaagtacgggtgataatgggatgcaatcgctttttccaaagtgtccgctggaatttggcgaggacggtgaccgtagcttaaaaatattgaaagaagccgattatatagccaaaacttccggtaaaaggaactttccgtggcgtttatttgtaatttcgaatgatgacagggatattgtttccaatgagatggtttataatctttcttctccttgtgaactggaagattacagttggattaagccgggccaagtaagttgggagtggtggcatgatgcccgtttgtacggagttgattttcgttccggttacaatatggattcttataaatactatattgattttgcttcgactttcggtattccttacatcattatggatgaaggatgggccaaaagcacccgtgacccattcacgccgaatcctacaatcaacttgcaggaattgattaaatatggcaaggaacgcaatgtgaagattgtgttgtggctaacttggctgacggtagaaaatcattttgacctgttcaagacatttgccgactggggaatagctggagtgaagatagacttcatggatcgtagcgatcaatggatggtaaactactacgagcgtgttgctaaagaagctgctaaacacaaattatttgtagatttccatggctcattcaaaccggcaggtttggaacgcagatatccgaatgttctctcgtatgaaggagtactgggtatggagcaaggtggtaactgcaaaccgacaaattccatctatctgccttttatgcgtaatgcagtaggtcccatggattttacccctggttctatgctttctgcccaaccggaagacaaccgttctactcgcgccaatgcgatggggtcaggaacccgtgcttaccaaatggcactgtttgtggtatttgagagtggcttacagatgctggccgacaatcctgtgtattattaccgtgagcgtccttgtacagagttcatatctagtgttcccgtggtgtgggatgaaactaaagtattagatgccaaggtgggagaatatgtcgttatagcccgccgtagtggaaaaaaatggtttcttggcgccatcaccaataatatgggacgtgaacttgaggtagatttaagtttcctgccagaaaacaaaaaactacatcttacttattttgaggatggcatcaatgcagatcggcaggcaatggactataaaaagaaagaaacagaagtcacaagttctaccaaattaacgatgaaactggtccgcaatggtggttgggctggcgtaatcgaataaaaaggagacaatatcatgaatttgaaaaatatatgtctgtttcttttgctatgttatacacaatggttgcatgcagaaaacggttatgagctgtggctacgttacaagctggtaagcaagggagaattttacacctcatactgtctgaaaaaccgtaaagtcatgtttcctggagaaacagaaagtctgattgctgcaaagaaagagttacaagctggtctgtccggattgttaaatataccctatacggaagaggagactttagaggataatatgcttatagtcggtacacctcaatctgtccctttgtttaaggaacaagctttccatgccgaaattaacggtttgtccgatgaaggctatttaattttaaattgtaccataaaagggaaaaagactacagccatagtagctcgaacagatatcggagtattatatggcgttttccattatctcagattgatacagaccaatcagtctttggataaactacatattaaggaaaatcccaaactgaagtatcgtgtattaaatcattgggataacctaaacggaacagtagaacgtggttatgcaggttatagtatttggaattgggaaaggcttccgtcttataaagaacaacgctatacagattatgcacgtgccaacgcctccatcggtattaacggaacggtactcaacaatgtgaatgcacaagctaaaagtttgcggactgattggctggtaaaagcttccggactggcagatgtattccgcccttatggcataaaagtatatctgacagcaaaatttagcgcacctaaagaaataggcgtactgaatacagctgatccaaaagatcctcaggtacgaaaatggtggaaagataaagtggaagaaatatattctttaattcccgattttggtggttttctagtaaaagcaaactcagaagggcaacccggaccacaagattacggctgttctcatgctgatggtgcaaatatgcttgctgaggctttaaaaccttatggaggaattgtattctggagagcatttgtctatcagaacgaacgtcatgtagatcgtgtgataaacgggtacaatgaatttaaaccacttgatggtgagtttgcagaaaatgtttttgtacagcccaaaaacggtcccatagactttcagccacgtgaaccttttcacccattattcggtggtatgccctatacaccgctgtctttagagtttcagataacacaggagaaccttggacatgcaggacatctggtatacctgggtactctgttcgaagaggtccttcagtcagatacttatgagaatggcaaaggctctaccgtttcaaaggttttacaaaattatcagaagacccatggcatttcagccattgccggtgtacctaatataggaacagaccttaattggacaggacatttattcggacaagccaactggtatgctttcggtcgtttggcatggaatccagatacaagctcaagcaaaatagcagaagactgggcaagaatgaccttctccaatgacaaaagcgtactctccccagtactgaaaattatgatgatgtcccgtgaaacctatgtcaactatacgatgcctctcggattgaatcatattatgaactatgatacacataacggacctgagccttggcacgacgatccggtatggactgctttcgactatcataaaataaccaaggacagtatcggcgtaaacagaactgccaagggaacgggagctaccaggcaatatcataacccggtcggcgaaatgtttgatgatatcaagcagtgtcctcaggaatatctgctatggttccatcgggttccttggaactacaagatggcttcaggaaggaatttatgggatgaattagtttatcactactacaaaggtgtggatgaagtccggcagatacagacaatatggaacgaactggatggtaagatagaccgtgaacgttttgagcatgtcgcatctttattgaagtaccaggaacaggaagccatctggtggcgagacggttgcttacttttctttcaggaatactcaagactgcctatccctgcaaatcttgaacagcccaaacattcattgaaatattataaaaacattccttttccacatgattggaaaggactctacaagtaaataaagacaaatgagatacatgatgtttacagtattgttgatgtggctattagccgcaccaacccaggcacgtcagcccgatgattattggaattccccccgtagtacctatgaagaacgccgtgctctatttttagattactattcagagaatggaagcggacacccgctttacggtgttttccgccaagcagcacgtgccgcctccggtcgccctttagagatggacaagatgagagaagtaatttccgtcatcaaatcgaaccgtgattgcaatgactttacactcaattgtctgcttcgcatggtatatctggacaagaagcaatctttctttccgacagaaataaaaggaagcattgaagagtgtattctggactttaaatattggtgggatgacggccgccgcgatacaacctaccgttgctatcatacggaaaaccatcaggcactttatcataccgcagaattgctggcaggtcagctttataaaaaaacaaagtttaccaatggaatgaacggcaaacaacacatggcacacgctaaagaaaggctgatgaaatggttggaatatcgtttccgtttcggattcagcgaatggatgtccacctattacgaggtggaagtattgttgctggccaatttgtatgattttgccgaagacacggatatccgttccaaggccggcatggtgctggatttacttatgtttgacgtagcgttgaataactatgagggcttccttggctcggcaagcggacgcaattatgcccattccatcattatgggagcccacaatacggctccattggccaagttggtattcggcgtggggacttatgaccgggatgaggtgatagcacccgtagctctctctaccagttcgtaccgttgtccggaaatcatccgaaaaatagcagtggactataagactcctctattaaaccgtcaacgagtaagtatgaacgtggaagatgctcctgcctatggcatttcctatgacaaggagttggactgccacctcttctggggtatgcaggagttcatacatccgatggctatccgtatgtccaaacagatttcagaaaaatacgatgtatggccctatcggaactatgatgaatacatcaaaaaatatgatgcgcagattgccgaacatggtaaacttgtggatatgcatctggatcgttttgcgctttctgaggccaatatagagacttaccgtactcctgattatatgttgagctgtgcgttagactacagaaaaggcgctccgggctatcagcaacatatatggcaggcaaccttgggcaataaagctttggtatataccaatcacccaggcggaaagaatctacgttggtcgcctaactattgggctggcaatgagattctgcctcgtgctgctcaaagtaagaatgtggtaatctgcatctataacacaccagccaatcaaaagaatgatttttcccatgcttatttcccggtaaaagcttttgatgaagtgcatatttccggttcctggatatttggacgtaaagaggatggctatgtagctttatattcaagaaacacagcagatttaagagccgatgacagaggagaagtctgtgacctactggcgaagggccgacagaatatctggatttgtgagacaggctcaaaatcgcaatggggtagtttttcgaagtttatcgaagccatatctactgcatcagttcatagtgacggattagacatcagttatgaatctccgtctgaaggtacggtttcatacggttgggacagtcctctctatgtgaaaggcaaagaaatgccattgcgctggcagtatagatatgataatccttactgcaaaaccccattcaattcaacctgtatagagatagaaaaggatggcgagaagataatcctgaattacaataagacgaaaaggtgacattcagtcacaacatatagaatatgaactataattaaataacaaatcgtttaatttaaattgtatattatgaagttacgaaaaacacatttattatggatacctttagtggtatgcctatttctcgtaaatagtgtaaatgtcatggcggctatagagcaagccattcatgtgaaagggcaggtcgtagactccacaggtgaacctgtgattggagccaatatcgtagtaaaaggcactaatactggggtgatttcggatatagatggcaattttgctattgacgctcctaaaaattcggttctgcttatctcttttatcggatacaaatcacaggaagtgaaattgacaggtccttcagtcaaaatagtgttgactgatgatgccgagatgctgaacgaagtggtagttgtaggctacggttctcaaaagaaatcagacataaccggagccatggtgaacgtaaagagcgaagcactacaacaagcacctgtaggaaacatcgggacggcattgcaaggtcttgctgccggtgtggacgtacaaatggcaggcggaaatacacatccgggagcttctccgcagattcgcgtacgtggggagcgttctctcaatggaggtaatgatgttttaattgtagtagacggaattcctttttccggtggattgaacgaaatcaataacgatgatgtagaaagcatcagtgtattgaaagacgcttcggcaacagccatttatggttcccgcggtgccaacggtgtactcctaatcacgacgaaacgtggaaacaagggaaaagtcaacgttagttatagcggctactatggttttacgattgctattaaagaatatgacgtaatgaatagctccgaatatatacaactgaaaaaatgggccacctacaatgccaacccggatgcctacaccggaattgatgatccgaacctgatgcgcgtgggtgatgtcttccgtgatcaagaggaaatggaaggctatctggctggaaacgatacggactggcagaacatgatattccgaaacggcatgacaacaaatcatcaggtagctgtcaatggcggtaatgaccgtacgacttatagtgcttccgtaggctattataaaggacagaacaactatgaggcacatagctttgaacgtatgacagccaaactttctcttgacacggagataaccagcttcctgaaagtaggtctctcaaccttaaacacttacatcatcaataaagggcaggataccaatccgatggaaatggccttacgtgcttctcctttcactactccgtacaaagaagacggttctctgcgtacttacctacccggtagcggacaaaatgtatggaatcccctgctggatacacaaaagaacagtgtggtagacgaccgcaaaagtctgtcaaccttcacgaccggttacattgacgtgaaattacctttcggcattaagtatcgttttaacggtggtgtaaatctgaaatattattcaatcggtcaattccaagccaccaatacgactaaacgcatgggagctcttgactggtcttttggagaataccagcacaccgtagactatacattggagaatatcttgacttgggactactcattcaacaacattcataattttaatgttaccggattattttccgcacaagagcaagagttcacaaagaacaacgtatcgggtaatgattattatgatgacaatatccagtattataatccgggacttgcacaaggcaatgtgaccggcggtggcagctatgaaaaatggggcttactttcctatatggggcgtctgaactataattataaagaaaaatatctgctaacggcaacagtgagatacgatggttcgtcccgcttggccgatggcaacaaatggcatgcatttccctctgttgctttgggatggaatttgatgcgtgagaattttatgcagaatgtcaatgcagatgttctttccggcatgaaacttagactcagctggggtaatgtgggtagtacagctattagtgcttatcagactatgtcaagattggataccggcagcaagtacttgttagggacaaacggtgtgatgggtgttcgtccgggttctgtgccggataaatccttaggatgggaaaataccgaaacttggaatataggtgtggacttcggtttcttgaacaatcgcattacaggtactattgaatggtaccagcaaaataccacggacttgctgttaggtgtgaacctgccttctacttcgggttattcccaatcctatcttaccaatcgtggtgctacccgaaatcgtggcttggaattcaatgtaactacagtcaatattgcaggtgacggtctggataaactctcttggtcaactgacttgaatatcttcggcaaccgcaacaagatcatgaatcttggcgaaggagtagagtttgacaaggatgccggattcttcttgggacaagacagatatatcatttactcttacgaacacgatggattgtggcaggatactcctgaagaccgtgcactggcagaatcattcggctacgcaacttccggtgccaattcagtaatcggtactgttaaaatcaaaaaccatcatatagattatgaagaagatggtgtaactccgaaagctaagcaaataatcaatgaagatgataaaacatttatcggacagcgtgctcccaaatttgaaggaggtatcaacaaccgttttgcctggaaaggctttgatctttcgttcttgtggacattccgttgtggcgggactattacttcggatatgcataacggctggatgaatactttgcagggtggttataacaacctgaatatagattattggacaccggacaacacaactgcccgttggcccaaaccaactaccgctacagtttccaataaagggttactggcccgttacgatggctcctatctgaaactgagaaatatcacgttaggatataatatccccaaaacatttctttccaagttaaatgtacagtcagctcgtgtatatgctacaggctcaaatctctacacttggtttagtaaagaataccgtaaggatggtggcattgatccggagactacaagtaccatcaatctaaagactcctcctacacgtacatttgtgtttggtttgaacttaactttctaaattaataatcgaataatagcaaaatagatatgaaaaaaatattatcaacacttgccttgtcatcacttgttttgctgacaactggttgctccgatttcctagaagaagaaaatcactcgaatgtgatgcaggatttcatggcgacaccttcaggttttagcatggccttgaactctgtttacgccaatgtacgctccacgtatagcgccgaagaaggtatccatggtctgatgaatccgggaacggatgaattaaagaataatataggaggaagtaaccgatgtgcagatctggcaaattacgatctagaaaaatataatgcaaacaatgaatatccacgaaagttatggaacgatgcttatattcacatcaacaccttgaattatatgattgaaaatgctgctaaagtagatgtcactaccaccgccttaaccgctgcacagcgtgatcagtacttaggtgaagcttattttatgcgagcttataattactttcatttggtggaacaattcggtgacgtcacactgactactacctataatgcatctcccagcacttcgtccgagcgccatgatatggtacgtgtttatgaagaagtcattatccctgatttgttgaatgccatcagactctgttcacccagcccacagctgaacaatctggagtcaggtcgtgcttctgccgcaactgcccgccacttgttgtcacgtgtttatttgacattagcctgggtattcgataaagaccctgctaatccatcttataaaggaaatacgcaaacgaagtactataacactaccaaagctaaggaatattatcaaaaggcttttgatatggcaaccggactaatcgcagatgcttcttctttgggactgaagttgatggacaattttgcagatattttcgatgaagcaaatgatgcaccttccggcaagaacaaggaagaactgtttgtagcgcgtatggactgggatgatgacaacacttttggcggccgcagcacgctgaaccattacttcgtgaatggctatgaccagtatttgggtgagcgtaatattaatgacggacgttgttactcttggattaatcctaccagctatacctataatgctttcaacaatcgtgataaagatacacgttataaagcaactttccagacagtatggtatgccactaaaacgcaaaaaggcggtgttgtcaattatgtcattgacggcaaggacgaaagcttcaactgggactataccattgttggtgatactgccatgtactatccgggatattatatgcctgctgaagaaatcagagctaaaactcaaaaccgtgaaggtaatcactatctgatttttacccctgacgcttacaatggtcgcgccattttcccaactatcatgaagtttctggacagaacgcgtgctattcctaatgacaatacagatcgttcttacatcatttatcgtttaggtgaaacttatttgctggccgctgaggctgctttcaaattgggtgacaacacgaatgcagctaaatatataaatgtgatcagggagcgtgcccgtgataagcaaatcggtgaagttggggcactggatatcgctccaagcgatgttacgctcgactttattcttgaagaacgtacccgtgagttacttgcagaacattgccgatgggcagacttagcccgtaccgggacattaatagatcgtgtacgtaagtatgacgatggtaaagccaatacgaacattacggaagacagacattggttacgtcctattccgcaacaaatgattgatcgtgtgacgaccggtgaacgttatccgcagaatcaaggatggtaatagatttaactatatcttaatagagagcaggtacgatctatacacaactttggtacatctcaaatgcgttcagttctttcagtacctgccatctctcctattccatcggcttttacgctgaaagcatccttttaggggatactttcagctttcagccgtcaccacaaccgcagaaacattcatcagtcgcactgcctccttaccacttgatacacatttccatactctgtgtgccgacgcaccacccccgctttcagcagcacttggccgaagcgcataggattgacgctgcgcatggcagcggaattcctttgctgaagttccctgaaaatctgggcagccgtaagaccgatacacttctcaccgaaattcgccacacgaaaataactatgaaaaacatcctctgcgggacaaacacggtagaacgcctcattctgcacctgcaacacctgctcctcttctttggtgaaccaatcacgcctccccgcaagcagttccgccttcagttgtgcataaatctggtcatgttctatatgggtacaatcgatcacccgctccacttccacgcaaagaaaacggcggcttcccgtagggtctgtaagtaagtcgaaacggttactggtaccaataaaagaggcgacacgaggcagttggcggaagctctgctgataggccttacgaatattcaagtcagacatttgcatcaggttcttcagcaacggcattttgctttcggcatacttatcaaactcgtccatattcagcaagcccatttccgccaaaaggcgttccgcctgcccttgcgaagtaagcttcaaattatccacataatatcgccgcagaaccatcggcatcaatgacttgcaaaatgtggatttctgccgtccctgctcttgacttacaagaataggcgccacactgttggcatgtatgcctgccagccccgaccactgcgcggcaagccccagcatccagatatgaaatccctgcacccaatgcggacagtcggaaacccgcaaggcgagctgtgtcagccggtcaacgccgtcccattgcggcaattcctccatatagagctgaaaggggtgataatcgggaatgtaagtagaatagatgtagcgactcaaatccttgtcccagcaagggataccctcagcatgagcctcaatacagaaagcgttcaggtttcgcttaccgacaggcaggaaagcgaaatcacgctgcccggcaggacggaattcggtctcttccgtcaacagattataacggaaatcataacgtttcgtcagaaaatccataacctgtctcgtcaggcgaaccgttgtattcgtgttgtctccggattccgacgcctccgatgttttctttttcgctttctgcctttccgataaagccaacaactgttgtgcctcgcgcaacaagcgacgttgttccaatgtcattaatttctttttcataacttcttttcattttaatagtaaacaggtttcgttttgtcagtaccaacgctacgaatttactacaacgagaaagcgctttgcaagcattccatcaactatttttcagagaacacagttagaaagaaagtaaggactttcataggtaaatcttactaatatcactatctttgtatgctgacttataaacggcccactccagttgttcactcgaccaactccagtcactcattctaccaactccagtcattcactcgaccgactccagtggttcactttcaagacagcaccttcgagtcaacaagtatatacatttaaagcattaagaaacaagcattatggcaatagtttacgattggtacgagaaccccaacgcggaaggggaatcggaagaaagagggctgcatccccgtccgttgctcaacggcaaagtgagcatggagcaattatattatcgggtacacgaacgcagttcgctcagcgtgggtgatgcaaaaagcgcaatagacactttaactcagctttgcggagaagagctacgcgaaggtcgggaggtgcacatcgagggattgggctatttttcccccactttggaagccacacagaaagtgacccgcaagaccaagaacaagcatttgaaactacgcttgaaaggtgttagttttcgcccggacattcgtctgaaagccgcactggcaggtgttacagccacccaaagtaaatacacgcgccactccctgcgactctccgaagtagagatagatatgcgcttgaaagagtatttcacggaacatgaactgctgcttcgcatcgatttccaggaattatgcggcatggcacgcaccaccgccaacaaccatctgcaacgattgcaaaaagagggcaaactgacaaatgtaggaagacgcgcacagccgatctatcgccccatgccgggatattacggtatgtcgagggatgcggaactcaagagataaagttagaaacacttcccttcaaaataagtgaaagaaaacgcatcgtcgctataagaacttttgttatctttgtgtcgttatgtgacaaggctacaaattaggaggacagaaaataattctgcaagaagtacaatgatgcacaacctgctttggagaagtgggtaacaaaagtaacaaaggcttcctggaagaaccataacgaattgaagaacgattatttatccgcggactatgtgggaaacaatcgttatgtattcaacatcaaaggcaataaatatcgccttattgttttggttgtattttttgctgggaacattgatattcgttttgttggaacccattcagattatgatgctattgatgtaaataaaattaaaactatataggaggtgcgtatatgaagattaagacagaaaaggaattccgtgcttatcaggcagacatggaaagcatcatcgctaaaggtacatctttgggtgatatggaattgttgagtgaggaagacaaagcaaaatatatagccctctctcaagccatcaacgaatgggaatctgcctatcatccgctacccggaaaagtttcaactttgattactgatgcaattaaggcaagaatggaggcaaataacttaaagcagaaagaagcagccaaacgacttggaatatcagaatccagagttagtgatattctgaatggtcgtcgttcattgaaccttaacattgtgaaaaggttacgtgataatttgggcataccggctgatttcattttagacaatatttgataaaacgttttttgtaagaaaactaataagacgcaagaaaacacaagacatactccagatgtatctttcatgtgcaaatttcagcattattatcttaaagcgggaagcattttgtgacatgaaagcacgaatacatgcctataagcgtaatatggagatattacgtacttttatgtcagaaattcataataaacgatttccagaacacgctatttttgtaagcaaaatatcttataatcattacactaaaatgaaaaagaaactattactcctatcattcttactgggaataaatggagcattattctcccaaaccaaaaagagcgttgtagactatgtaaacccactagtagggacagactccagtttcgaattatccaatggtaatacctatcctgccatcgcaatgccctgggggatgaacttctggaccccacaaaccggaaagatgggagaaggatggacttatacctatgcatctaaccgtatcagaggtttcaaacaaacacatcaacccagcccttggataaacgactacggacagttcgccatcatgcccattacaggtgagcccgtattcgaccaagacaagcgtgcaagctggttcaatcataaatctgaggtatctacaccctattactaccgcgcattcctctccgatcacaatattacaacagaaattgtacctacggagcgggcagccatattccgctttacctttcccgagagcaaggattcttatgtagtaattgatgcattcgacaatggttcgtatgtgaaagttattccggccgagaataagatcatcggctacacaaccaaaaacagcggtggcgtaccggccaactttaagaactacttcaccattactttcgacaagcccttcacttactcggcaaccgtaagcaatggtgaaatcaaagtaggccaaccagacgttaaagaaaatcatgccggcgccattatcggattcgccacccgcaagggagaaaaagtatgtgcccggatcgcatcttccttcatcagtcccgaacaggctgaacagaatctgaaagaactcggttcaatgaatctggaagaactaaagctgaaaggtaaagaacgctggaacgaagtactcggccgaatagaggttgaatcggacaacgaagatcaacttcgcaccttctactcctgtttatatcgcagcgttttatttccccggacgttccatgagattgatgcggcgggaaacatcctgcattatagcccgcacaccggcaaggtgatgcccggacgcttctttacagataccggcttttgggattccttccgcggagaactcccaatgattaacctgatatacccttccatgagccgacaaatggaagaaggtttcctgaatgcctatctggagagtggtttcttcccggaatgggccagtccgggacatcgcaactgcatggtaggcaataattccgcatcagtagtggcagatgcctatgtgaaaggcaacatcaaacagaatgccgagaaaatgtatgaaggtttgttgcatggagcaaacaaccagcatcccacggttccttcttccggccgcatgggctacaaggaatacaatgaattgggatatgtaccttccgatatcggtcaaagtgccgcccgtacccttgaatacgcctacaatgactggtgtatctatcagatggggaaaaaactgggcagacccgcatcggaactggacatctacaagaaacgcagccagaactataagaacctgttctatgctccttaccgcctgatgagcggcaaagaccgcaacggcaacttcccgcagcacttcgatccggtggaatggtggggacctttcactgaaggaaacagctggcattattcctggtccgtattccatgatatgcggggcttaattaacctgatgggaggtgacaagaactttgttgctatgctcgactctgtatttactacgccgcccgtattcggcgcaaacactaatacccggcaaagcctgatacacgaaatgcgcgaaatgcaggtcattgacatggggcaatacgcacatggcaaccagcccatacaacacatgatttatctctataactacgccgggcaaccctggaaaacacagtattgggtacgcgaagtgatgaaccgtctttaccagccaacccctgacggatattgcggagacgaagataacggacagacttcagcctggtatgtcatgtcggcattaggtttttattccgtctgcccgggtacagacgaatacgtgttgggcgcaccactctttagaaatgccaagatacatctggaaaatggcaaaactatcgagatttctgcgcccctaaacagcgatgaaaacctctatatcagcgatgtacgatacaatggcaagaagtatgacaagaattatctgaaccactccttattgataaaaggtgccaaaatcaggttcgacatggacagccaccccaactataaacgcggaacagaaccggatagcttcccctattctttctcagataaagagaaataatcatgatatcaaacaatatgaaaaggaaaatagcaactttctccagtcccacgccttcagcaacaatggtatctcgacatacaattgttataggtcaatctcaaaatgctggtaatccttcaatgagatccagtcgcctccccattcaaatccggcttccgtaaagagccggtatgccaggtcgttatgatctatcttgtacggtatatccgtcctgttatcacggtcgaaagcgtatggttcaccggtagcgggttctatgtgccaggagccgtcagctttttccttgacgtatggattgtaaagcgtattaatatcgatggcaaggccaagtccgtgcttggaaatcttggtagtggagccggtcatgaagcggaagttgaacgatgaggagttgttggcacgcatagaactttcatcgtcggcatcgtagttgtcaatgagcaccatccgctcaatgcggtagtctgccaagtagagctggcgaaatatgtcgattgctttatcggcaatggcggcgttcaccaccatctcaccccgttgggggttaccgtcagcgttgcgatgcaatacttttagataacgcagttcggaccgattcaaaggacagtcctctttccatgacttgagccacatgcggctgaatatctggtcgctgatagcttccgaatagaaccaggcatccacaccggagtgttctacgtcaacttcggacaccaaagtttcggctatccactcatcgttaggactttgatgtccgaggtcgttgtcacatccaaccaagagtaaggtgaaggacatgacaaaaagtagcaggtattttcttcttatcatatttattaatgtattaattatctgtctttacttctcaatcttccactccggtagtgtgctgcggcgagtagtggaggtacagtaaaaaattgtgtcgcgataggtacgtatgtagtcaatgagtagggtgctgtcggtgtgattcattacgtgtacgttttgtaccggcttatcggggtgtgacatatagagggtgtcgttgcggaaagtgtatcgaaaccgcagcttattcatcagcgtgtcattttggatgacgtagaaggtcattatgctgtccggggtatagacttcgtagaattgctgttcatgcgggttattgacgtagtcgtaaagtatggtgtcggaagcagttcccagcacggcttgagttatggtttcatagtgccatgtgccgatgaagttcggaatgccggattctgtgggggatgttttgcttgttgttccgttgcatgatacgaatgctattgttgccatcaaggcgatactgatgatataaagtatttgtttcataatttattgttttacttacctatgtttataatatatggtttctaatttcaacgtattaatacatctttgaattctccggtaatggcctgtcctgtagaggggtcaaggttatataagtagaacaccgagagtgttccgtcttcctctattaccacatttacctccgaactttgtccgtctttattcacccagcgcagttcaccggtaacgttgttcacgctccagttcatatcgctcgtcttttcatcctcaccgttgcgcgagtatacggtaaatgaaccgtcctcacgatacaagtaccaaccctcgttaggcagtccgaaggaaatctccacccactcgccgtttttcttctcgtagctcttggagaaattccatttgcctatgagtttttcggcaagtgtcttctgtgcttcatctatgttccacttgccgataacgttctcggcgatgggtttcagaattttattatcagactctggagttgcatcttcactgcaacctatgtttagtgttcccattgcgatgcaaacaaggaacaaaaacaatagtctttttcttattcgattcataatgttacatctcattgttagtcatgctatttatagaattatataaagttttcgttgtcagcacaaaatgtagcagtacatacaacctttcccgttcccacgttcgtaacctgaaaggtataatccccttgccacgcctcgcctttgagcgaatcgaatgctttctggcaagcctcgtaaacttgtttgtcacattcttctatcgtacctttcttggtgaaaggtttgccggtgataccgagagcagcctggaagcctttctctatcttactcatctcagcaaggaagtcgggatgcgatgccgacatttcggaaaaaccgtaagtgtaagttacctcgatgttggtgttctcttcatcgtcgttgcacgcggtgaaggtgaaagtaaggatggcgatagccatcatcgtcagcagtgctgacatttttttgattgatcttttcattttgatttatcgtttttgaaatttataaattctgacatattgactgaataaagattgccatagttttcggcattataaaccattacatggcttccgacagtattgatgaacagccgataatagaggtcgcgcatagctacatccttgttatcggttatttgttcgataaaagtggaggtgaaacggttgctcatccacactttcatctctccgttgaagacatcagccttggatgtttcgtcaccgttggccgcagtgatgaacagcattccggggatgccctcgcactgctccatcacaccacccgaaaaacatgcctccaccatcatgagaagtttacggtaacgccttttgaggttcatatccttaaaaacagtggacaggtcatcgcctgtcatggcgtaaggctcctcatcccagcacatggctcccggtacaccgtgtccgctccagaaaacgaacaggttgtcgttttcagtagattcgatcactgtgggcaaagtttcgcttttttcgccattcagaatggcaagtatatcttttgccttcaacgatgacatacgataatcaatctctacattctcatacacattgtttcccccaatagtcacctgtataactcctttgttgggatttgagacattatcggctatgtcatcctcgacaatgagaatgatgcggtcgtcggtatatccggcctgtctgagctgctgatagatagcgagcacatctgcctgatggcggtaattggtccattccttggaggaagcaacaaggagtgcccagttgccggtatgtgcagggtaattgaattcccctgaattgttgaaatcctgcatctgcgaggctttccagttccagccggcaagtgtcgcatccgtgcggttccctccgtcgctggtgttatagtcaaggatgatatactgtccgttgtaaaccttgaaattatagtaggtggtggcaagtacattggtaaacacctttgcatcaaacctcaaatgccccgaagctccgcgaacatacggcgactttccggcagcaagcgcatccaccacaagccccatatcctcacctgtccagctacccatgttcaagccttcacccgaaacaacggcccttaatgatttttgtaacgacaactccggtttgaactgctggtaccatgcggcatagccgatgagcattgcagcatcgtagagctgtgactcaccaagagtaggtgtggcattgaaaaacgtcttgtaactcacgtcaaatcccgattcaggatcggcaccaaatgcgactccctctataccttcggctgcatcaccgtgaatcttgagcacatccgcaccgtaggcagtatccgaaaacagcattctcggtacactacacccgttcaggctttgtgttttatgcgcttcaagcatcggtcccatctcttctatttcagaggggatgcatatcacatattctgcacctgactgcatggcttggcgagacacatcagctacattttcggaggtgtaagcatagcatcccatgtttttcagtccgagttcgcgtgcctgaaatgcgaaccagtcaatgaacgtttgtccgtaattgtcgttctccttggccaaaagcgccacgctttcaccctcatagttaatcaccttggagagaagcacctcacattgcgtaatgtcggtctcggtcatcgcccagagatagcctgtcgatgcgtatgcacgaaccagttgttcggcggtggcgagagtgaagaatgttttgcccacaagagtcagtcctgccgcgaggattgccgcgttggatgaatacagcccaccgattacggcatacacctcatcgttgaatgccagcgattgggcaagttcttgcacatcgacctttgcctcatcgtagtattcaaactttaaccttatacctgcttcgtggtttttgaatgcacgctcaaagttggttgtaaacattcccaatgtccttttccaatgtacatcaagccctttctccatgggaagcaccacggcaacaaccttctctgtccactgcttgttgtcaggagaacaagaaggctcatcgtccgagcagctccacagaccaatcaggcagaggagcggcgcaataagtttaataaccactcgtttcataatactctttctcaaaaagaatagcctggcgacgcattccattgactaagctgctgaaatcattcacgtatcggggggcgaccagccagtcggcatacccgctttcaagaccgtaaagttggttctccggcataatccccgtgactacccattccgtcagatacctgtaaatcaattggtcgatatgcttaataaccgagccagtgattcggttggagagacttgactggtcgatatccatgcccaccagaaatggtgagtactcaaattcccgggagtagcggtatataccggcattagagccacctgccactgggaaaatgaaatcgtaatcaaccacccaatcactcattttccggtaagcgagcgaagccgacacatatcccgtccaatcatccgcaagatactccacattgcagtcactgccgtagcctgcaataaaaccgtctttggctatgttgatgggactgtcggtattattagcaagcaaaatcagaggtgtcatctctgaacattgttttgcacatactcctgcgaggtatgaagctccgaacattgaaatctggaatgtatgaatgttctcggctttatattgtttccggctttcaaaaagcaggatacttttgttgggtgtcaagtcgtgctccgccagatgaagttctgccattggctcataatcgctgctacccaaaacaaacaacaccggaatttcgctttccggtcgtttgagccagtcggagaagattttctcggcttcaagcaatgattcgggcgaatagatataaatgtcaatctctttatgttccattttgaatttctgaacgccttcaaggatgcagtcgttatagctcatgtcgcccaatccgcttggagaaaaaagaaaaacaatctgtggtgccagagaaaccggctccaactcatcggcatgattgcaggatgacaacgctcctgttaccaggagcgttgtcattgccaaaataatacggacaggattatacatactattcaaactcacatccgcatttagagcatttataggggccggatgcaaatgttttccacttatgaccgcattggggacattcttcagtccaccttgccgggaagtattggtctatagcaagattatccccgctgaggtattcctctggaacaattacgactgtcataaccggctctctgaaattcttgagtgcattgagcgaaatagtgtaaaagacgctttcatctgtccccggcgtaagtgagattgtgccgcagttgtcagggagcttgacagtgcgttgctttccgtcccattggttgagaatgaacttctcacacaattcatgggctgcctcctttgagtctgcaaccaatataagccgagtagcatcatcctttttcagataaagatttccggcttcagcttggtcggcaattatcttgtcgatattctccaccattttttctccagatggttcttgtggctcatcgtcgttgttacaagcagtgaaagcgagcattgccatcactgaagcaaacatgatcgttaaaattttctgtttcatttttaattatttttttaaatttctgtatttgatattgtaaatggttatttcacctgatttattcacgcaccaatatatccttgcgtcccacgtctgccacaccttcgccaccaggccgcagttcatactctatcatgtcggggtttggcgtttcaatatacttgccatctttcacctcgtaacttttccattcctgccatacgccttggatttgctgttccaagggccgcaggatgggatcttcgggcgcgtcgctatcatcacaggatgtagcaataactgccagtccgatgagagccggcaacagtaagagacagtgtctgattgttttcatatctgctgatgttttttttagttagtctttcaaaagaagatctctatactcaccctcgcgcatttctcctgtagcagggtcgaaattcacggagtagaacacgtacatcgtgcggtcatcctccaaggtgatgcgcactcgggacaccttgtcgctgtcgaggggcttgtaggagactgtgtcggtgacggcattcgctttccactgcatcggtgcggcggtatgctccttgccaccctgacgcgagtaggcggtgaaggtgccttgctcggtatattcgtgccacccttcatcagggataccgtaggtgatctctttccactcgccttccttcttctcgtagctcttgctgaaatgccagcggcccacaaggcgttcggcaaagttcttctgctcttcgtcaatgcggcggaagagccatttgaattctccctcttgcgtggcaccggtagcataatcggttgccttgtcgtatccgaattccagctcgtcggcagtgaggcgcatcagggtgtactccaccggatatgctttataattgattttaaatgtgtttttatggtcttccgcctcccaagtcagagatctcagataggtgtcgtgattggcgtaggtaacggcggacatcatggagccgtcggtgcggaaaagataggttgtgccgctgccttccggctcgatcacttctttccactcgccatcctttttctcatagctcttggtcattgtccacttgccgggaaggtttgcggcgatggggttgcgtatggcttcccctttattctctttgtcgctacatgagggaaaacctgctaaggtcagcagggtaatacaaaagagggttaatacattcttcttcataatacttatcatttaatataaccaatatattgtttaatattctattttatcgtctttcttcatccacatatcaaaagccttgactgcttcgtccgtacgggcgtctttcagattgagggtgacgttgataagcactttgtaagcttgttcggccggtttgtctttaacagtggagggggtgacttgcgaagtgccagtaatactgttgattgtaccgtccacataaagggcttcttcgttacctgccagttcgttgaagtggaagtctccgtgatgacccgaaatcgtgtgacgtcgcttaatgcttttacgatagcttcacgcaccgaaggggcatattcatcgtgctgggtagtactcttacctgtgacggcggtggtagccagatcggtcaggatgctgcctacggtctgctttttgttttgtgctttgtcaacgtaacgaatgtcttccacagataccttcaggaaactgttacgcgaggtttgtgcccgcagggctgccgcttccggcaacagggccggaagcagcaggatgagggcaaaaggaatgtatgtcttcagtttcatcattctaatacttatttatctattaaatcaaaaccacaggcggtgtaccattggtttaaacggtacgagcgtatagcataattgacatagtcctgaaataactgaaagccagagtagttttccagtgccatgataggatatatcgaaagtccgttgtaatagggttctatatggttgtcaacttcatcatacatctttacatctttcccgaatccgtaagtgttaatcaggcatgctttgttgtatgtcgaaaaccattcatcggtaaacgctcctgtcttgcgcatgaaatccacaaaatcaagctgggcagaaggaaagttcttttggaatagttcctcgcctttgccatcgtcgaaatagttttctgtaagatggcatttgttgataaaagcgtcctgaatatcagctaaggtgattttactgtccatcagagctttctttgtatctgcggcaagcttgtcaagttgggaagcatctatgagggacagtgtcgcacatttgtcgtcatcggccgaattattgtaaagccattcgcaggaatgtaacacaaactttgacaggtcggcacgggggctggtgtaaagatacgacagattttcatgccaaggccatcctactgaagaaagggatacttcgcttgcaaccaaatacctggtcttatgacgcagttcgaatgccacctccacgcttgccatcatacaagcgtgcatgatcataaattcatagtcgggcagagtaaggtctgctatttctctgttttcaagatatttcacggcatcaccgcccattcctttggtcctgaatgtattatcatcgtttaggccaaatgggagtatgccgctgccatgtccgaaaagcataagtccatagcttttcgcaggggctatggcacggacgtcgttctgtacttccggataacgagcgatgtccccgtgagtcccaattggctcatattctttgacaacctcgcttacgatggccggtgtgtcatcacgctttatttttagcagaaccggattttcaaactgtacaaacatgggcgacggatcaatgtaaacataaaggcttcctgcataactgtcgtcccatcctgcctccattttattgatataatccaactgagaattactgagaacaagaccgctttcgccgtcaatatccccccagatataagcgagaatggttctttccaccggttggggttcttccggcagaggttcttcattaatgttgtcgtcgtcattgtcacatgacgcaaacattgcggtgaatgacagcagtataatagctgtgatgtttcggcaaagcaactgtatcgtgttcataaaagccatataagtgagtaattaaatttattatatgtaaaaggttacgtaaatataaatttgaggagaaacaacaccgacagcacatacatggtagggctaacctcccggtgtctgcccgtgcccagtttgagcaacacatagcagagcatacccaagatgatgccattggcaacggagtaggtcagcaccatagttatgatggtgatgaacgcaggaagtgcctccgcaatattcttcatgtctatttgagtgatggactccatcataaagacacccaccagtaccaatgctccggtcgtggcagcaccggggatgagcaggaagatgggagcgaagaagatggacaagaggaacattccaccggtgaccagcgaggtaaacccggaacgcccgccttcggcaacgcccgaagcactctccaagtaggtggtaatcgtagaacaacccagtatggctccaaaggtggaaccgatggcatcggccagcatagtctcttttgcacagggaatttcgccgttctctttcacaatcccgatccggtaggtaagggcgaccaatgtgccgatggtatcgaacatatccataaagagcagcgtgaagataatcaccgccatatcgagcgtgaacaactggctgaagtcgaattgacaaaaggtaggagccagcgaatggggcgtggagatgggcaggaatccttcgggaatcgtagtcacacccaacggaatgccgataagcgtacaaatcaggatgctataaaacaaggctcccttcacctgcttcaccacgagcagtccactcaacaggatgcctgtcaatgctaatacggagacgggcgtgaagggaccgaacgtcacgaacgtagccgggtcagagacgatgatgccggcgttcttcagcccgataaaggcgataaacatcccgatacctacagagatggcgtagcgcagcgtggctggaatgctgttcagcacaatctcgcgcacgttaaagaaagtgatgaggatgaagagaagtccctccacaaacaaggcagccatagccacttgccacggataacccatgccctgcaccagtgtgaaggcgaagaaggcattgatccccatgctgggtgcctgtgccaagggcagctttgccatgaatgccagcagcaaggtggagagggcggtggcaagcgcagtagccgtgaacacggctcccttgtccatcccggtggaggagaggatggaggtattcacggcaaggatataactcatggtaaggaatgttgtgattccggcgatgctttccgtgcgcaatgtcatagtcttggggttgaattccaataatttctgtagcatagtgtttctgtagtctttaatcattaattcttaatcggatgcccacttcatccccgatagtcgagtttgaatgattcacagcgtgaatgccagagagaggaagctgctctctctggcaaacacgtctttatggacatctacttctcgtatttccatatgggcatctcgcaacggcgagtggtggaagtcatatagaaagtggtatcacgaagggtgcgcacatagtcaatatgtatgacgctgtcggcgtggctcaccacgtgtacgctttgcaacggcttgtcgggatgcaacatgcagaggctgtcgttgcggaaggtgtaacggaattcgagcttgttcagcaacgtgtcgttctgaatggcgtagaaatgcatggtgctgtccgccaagtagacttcgtaaagctgctgttcttgcggatttcccacgtagtcgaaaaccgtagtgtccgaggcagctccttgcacgctctgggtcaccagttcgtagtgccaaacaccttcaaaagtaggggtagcggttttagtggtatcctccgcgttcttgcacgaggcgaagattgcacctgccagcagggcgatgccaacaatataaagtaattgtctcattttgtttaagttatgacattattaagttataaaatcagtgagtttattcttatttctttatcagcacgtctttgaactcgccttccaccacttgtcctgtgtcagaatcgaagttctttccatagaacacgttcatcgtttggtcatcatcttccagggtgacacgtgtggaggagacttcggggttgtcggctaacttgtaatagactgtgccggtgtcctcgttcgccttccatgcgatatactcgttcttcatttcctggtcccctttccgcgagtaagaggtaaagaatcctgtttcaaagtattcgtgccatccttcatcgggcagtccgtaagaggtttccacccattcgccgttcttcttctcgtagctcttggagaagtgccacttgcccagcagccgttcggcgaagttcttctgcgactcgtctatgcggcggaagagccatttgaactcgccttccagggtctcatgggtagtcatgtcggtggagaggtggtagccgaactctaattcgtcatcggtcagacgatagaccttgtagacgtactctttgaagagagtcattgtgttgtcggtgtcgttggccatccaggtggtacttctcgtgtgggtgtcatgactggccattgtgacgatggaacgcattgtcccgtcggagcgcatcagataggtagtaccggaaccttcgggttcaatcacttccacccatttgccgtcctgcttttcgtagcttttcacctgagtccacttgcctgtaacattctcgccaataggtttgcggatggttgtgtcagatgtctcattattgttgcaagcagcgaaagcaattattgtcgccgctgctgtaaacatgatagttaaaatattctttctcataaatttcatttgtcaatgcgtttttatatcaatcaggatatagttacgacatcatgcctcaacgaaactcgaagaggttgaagaaaccggtgatggtgaatacggaccggatgtcatcgttgatgtggctaagggccaaggtgccccccttctttgccacctccttgcgcaaggcaaggaacagccgcagaccggagctgctgatgtattccaatcccgtgcaatccagcacgatgtccttgtccgcgctgtccatcaggggttgcatatccttttctaattggttggcaatggctgaatccaatcgcccgttgagtatcccggtcagtactccgttctcgttcttaatctcaaaattcatcatattcaatttttaaattggttataaagggaataatatagtcacaataaacaggttggccgccaagataatcaggttcatcaacagacctatcttcatgaagtccgagaagcggtaacctccgggaccatagaccagcatgtgggtgggcgacccgatgggggtggcaaagctggaagagacggcaatcatcaacgccacgcagaaggtcagcgggtttacccccaacgctatcgcgctcttgtaggcaatgggaaagaacatggctgccgctgccgcattgctgataagctctgtgatgaaagtacccaccaagcaaatcacggcaagcaccaccagcgggttagtcccgcacatccccaacaatccgtcggcaaacttttgcgcgattcccgtgttctcaatggccattcccaagcagacggaacctgcaaagaccatcagcacattccagttgatgcttttacgtgcctgctctatgctgcaacagcgtgtcagtatcatggcaaacgctgctaggaaacaggcattcagcagcggcatcacatggaacgccgacaggagcatcatggccagcataatccctgacgatacgagcgtcttatgattgacctgctggatattctccgaatcgaagaaacggacatctccgttgaaatcttcctcgcgcaacttctttccttccaacagcaaggtatctccggcctgcaagacagcctcccggggactcacttccaaacgcttgccttgacgggcaatggccaccagcaccacatcgtgctcttcctcgaagcgcgtatccgtcatgcgcttgcctatcaagtcgctgtcaaatgccaagtagccggtctgcaacttccgttggccttccatctcggtcacactatagacgtgatgggtggcattcaccaattggtgcgtctcgcgcaggtccaagatggcatcaatctggccggaatagaccagacggtcgccaccaagtatgaattcatcggcgggaacgggagagataatctctttgtcgaaacgtacgatttcgaccaagcggcctccccgcacatccatcaaaccacactcgccgacactctgccccaccagcgggttcgtggtaggcaccatcaactccactgtataatcggaaatggactcaaacgaactttccggtgatttccgttcgggcaacagcttgcgcagggctatcatggagaggattcccaccgctaggcagaagagacccggcagcgtggtggtgaacacacccaactccacaccggtctcacgtgcatagaatcccgagataatcaggttgggcggtgttccgattaaggtacatacccctcccattcctgaagcatagctcagagatatcaacagcttcgaaggggcaacatccaacttcttcgaccacatcttcaccacgttgatgaacagagccaccactgtcgtgttgctcagcatcgagcttagcatcgccaccggcagcatcagccgcactatcgccttgggataggacgaagggttgcccaacaaatggcgcactatccactgcaacacgcctgtataaaccaggcctgccaccaccacgaacagtacaccgaccactaccaccgattccgagctgaagcccgacagcacctccttggcaggcaacacgccacataccaacaggaccgccatccctccaacaaataccacatccgccggcagcttggtgaagagcaacaagccaaacatcaccagcaccagcacaatcgtaatccaagcattcaagctaagacctaaaaatacgaaactctctatcattctctcttagtttttgagttttttctcattatcaatacattgcaatctccttcccgcctgtacgccacttcatccatcaagttgcgtatcaggaaaatacccaatccgccaatcggcctctcttccaatgagagggtcacatccgcctccggcacggtgagggggtcgaaaacccctccccaatccttcaggcagaaggtgtgtgtccggctttgttcgtcccaggctgaggtaaggactatctttccttcctccatctgcgggtaggcataatggatgacgttgactaatgcttcttccaacgccacattcagcgacatcatctccgccatacccatgcccgtctcttcagctatctcttcgagaaagagcggcagacgagacacttcatccagactgttagtcattacaagttccttgctttccactgtttcaattatgaattataaaactattaattatcagctgtcaaccgcacacagagtagcgtcaagtcatcactctgctccgcctctccggcgaatccggtcactaattgtatcatccgttccacaacggaacgtgctgacagattacccaagtgtgacatctctcccaacatacgctcatttcccaacagttcacagttgctattctctgcctcgttcaatccgtccgtatatattaataaggtgctttccttaggcaacatcacacactgctctgtaaactcaaaaccatcgcaaacacctatcggaatgttcggcaccgtgtctacaaaagagctctgcttatccggctctaccaacaagggtggattgtgtccaacactgcaatacgacaacctgccactatccagttccagtgccccgatgaacatcgtgacgaacatattggcgtcattctgctccatcaccgcgtggttcagcttggctgcaatctccgagggggtgtcgcaagtgcctgccatgatgcggaacaggctacgcgtcaccgccatgaaaagcgaagcgggaatgcccttgcccgacacatcgcccacggtgaagaacagtttcccgtcgcggatgaagaagtcgtacagatcgcctcccacctccttggccggagagaggctggcatagaggtcaagcgtcttccactccgggaaaggagggaagatgttggggagcaagctcatctgcaacttgcgggcaatgttcagctcgctctctatccgctcctttgcgcgggtggtctccgtcagccgatggatgtagtcgtccaacgaacgctgcatgtaggcaaaggagtccctgaactgagccaattcatctttggtgcgaatctcgggcagcggtgccgccaggtcgcctttcgccacgcgggacgcagcctcggaaaagagcttcagcgggtgggaggtacgtctgatgcgccatacgcagaagaacagcaacgccagcagtcccaacaggaacaccgacaccaccaccaaagtcagcctgtccagcggagcaaacacatccctgtagggacagaccactgccaccgaccattccgtgccctccacaggtttgtagaagacataagagagcgtatcatcgttctgcaactcgtgcatgccttcctcgccccgtatcatcgcatcgcccaagatcgtcacactgcggtccgtcatgtcggatgtagcggtatagatggtctcgtgcaggatgcgttccggcttgggatgcaccaagtagttgcctaaacggcttatcatcagcgtgtaggaaccgggataaggtttgatgccattcaccagcccgctcagatggtcgagcgagatgtccgccgtcaggatgccgaacatcttgccttcgccgttgcgcaacacgtgcgagtaggtggacatcacacggtctcccccaccctcgtcaaaatagggttcgctccaatagttgcggtcgaggcgtttgggggtggcataccactccttcgcgtgatagttgtaggccgcatagcccaggtttcggtccttcacctcgccttcttccgtcaggtaggagtaaggggcgaacagctcacccttctccgcatagaatcccggctcgaatgccacacaactgccgataacgtgcgggttggtccgcatcatcatacgggtcacggcataaagcgagtcgggattgccgaggcggtcgcgcacgagccattccatgttttttgccgccgcctccacctggtgcaggatgtcttctatctggtaaacggtgccggaaagttcgctccccgcatggctctctgcctcctggcgcacgatgcgtttggaggagaagaagagcacggagaacaccaccccgaacaccatagaggctatcatgaccacctgcaagctcaggcgggcggaaaaggacttccgaattgtcttcatcggattcatcagttgttcgggctgctgaatacaacgtagtatttaggttggtttttctccttcttaaagactatattcagacttgcaaaaccgtccttgactctttccgtttcataaaccacatgcacgtactctgaattaaaggcttttatcgtaaaaaaccaactttttgcctcagaatcgctaacagaaattatctccctacatacaaaagcatagacttctgtctgattcttgaaatcggtgcatgtcaaagtcgtgtgtcccgaacccgaagcaggaaagccggaatccaacttcttaacgaaatcggtaatattcttagccgtcttctcttccgcactcttcgaagagccaccgaaaatattctcgttgtcggcattgaacgtggctatgcacaccaactcaccggtgagggtgtttctcacctcgaaaaggtagtcgccctgccacacttcgcctttgagcgaattgcaggctttctcgcaagcttcgtaaacctgcttgtcacactcttccaccgtaccccgtttcgtaaagttcttcccggtgacaccgagagccgacttgaaggcgttctctattttccccatctcttcgatgaagttggggtgtgaggccgacatttcggggaagccataggtgtaagtcacttcgttgtctgcatcttcatcatcgctacaagcagtgaaggtaaaggaaaagatggccatagccgccatcatcgtcagcaatgctgacaggattctaattatccgtttcatgtttattctttattatccattattctacatttttcatttcattctcacaaacacatccttgtgaccgccgggaaccatcttctccgcctcggagtcgtagttgtcggggtggtagatgtgaacggtgttctcgtcctcgaaacagagacggatttccacacgcgcttggctacaaatgtcccactggctcaatatgtccgccggttcgccccacttggcaatttcacctacacagccgctgtatctcttagtctcaaacttgtcgcctgtaagggtgtagagagcgcaactgcctctcatgtcgtactcgcgcgcagtagtcaggcatgtcttgtgtaacctctacccattggccgtcctgctcctgaaatctcttctgaagctgccatctgcccaacagctgtgtgtaagcggttttggtcggttggttgacgcgggtatatacccacttgaactcgcctttcagcacttcgcccgttgcgtggtcggtagcggtggtgtccaagacaatgaattcgttctcggtcaggcctcccaatcgtatcccttcaccgttcaccttcagtgtgtcagcggtttcgtcggcactccaggtgctctcaaacatgtacgtcttgccgtcttcgcgcctcacattgtggtagtagatgccaccgggacagaacactaagtcattcacgtacatttcggggatgggatcctctatccacttgccatcttgcagcatgtagttgttcgtctgcttccatataccaaagaggttcttggtgagggggcgcaggaagagggtttcatcggtattgtcattcatctcgtcatcgctacatgcagtgaaggtgcaggcaaaaattaccatagccaccgtcatcagcagcagtgttgacattgttctgattgtctctttcatattcattccttgccttttattttacctttatttctctcttatcagcacatccttgtactccgtcgaagtctgttcctccaactccggattgaagtcttcggagtaatacatcaccattgaattgtcattgttttccaatgatatgcggtaatatctctctttccgttctccgggaacatagtaagtgacgacaccggttgattcattgacagaccaccacatattatcgtttttccattcctcagcaggccagcgcgtataggtagtgaaaaccccgctttcggtaaagtcactccaacactccaatggataatcaccggttgtttcagtccatactccattggctttcgcatagcgttttgacagcgaccatttgccaaccattcgttccgcgagggtcttctcttcttgattgatacgctgaaaatgcatcttgtacttcatgtctcccaatgttgagacaagcaccaagtcattttctgtgagttgataaacttcaaatctatcttcaaagatttttaaggtatggtcagcgtcatttacatcgccccatttattgagcgagaggtgtgtttcatcatcagtggaggaaaccatgaaaaattcgccatcgggtctcattgaatattttaaaattctatcgtcatctgtgccggttgattcccatttccctccttcctttctgaatgattcaaccagttcccagctgccaacaatgtgttcggcaataggagtccgcacagtgcccttaccctcttccaaatcatgtccatacgccattagagtctcgtagaagtcgcaccatccggtaagctgttcaaaacggcatttgcgatattgctctcgtacatcagcctggtaatcggaggtattggtgtaggcagtataaagaaaatcatgtttgccgttggtttgcctatgggtgaccacaatgtctgaaagcactccatcgagacggtttatatagaacgcgagacccatgttcccgctctcgacatagacggcgtggaggaaatccacaagatccaaactataatagggtcgcatcgtctgaaagaaatcgtcataatcatgactcacctttgaatgcaaggctcttaaataaccttctccataagtctggccatattttgccggagcgtcagttgtgaaattgacacccgacatggtgttgcccatctcctctatagtttgacggaggatttcccataaaggagtgaggtcacggattctgctcacctcaaccgcaagaccaacaacttcctgattgtgaaactcctgccacagattcatggcgcggtgtgcggttagggtaagggtttcctccacagagcgcccttgtctcaggtcgttgacaagtgaagtgtaatcataggcgaggtcgggtatgacgaagggggagccgagcaagagatctgccgcaccttcccattcagcgagcatctcgatatttccctgattgcatgagttcataatcaaggcatcgatgtgttgtcctgactggcgtatagcgtcccccaactgggcggacgtcattctatggtagctgtcgtacagagtggctcttgttgagggtggagtttcttgctctttcaaatcgttataaggagtaaaattgcttccatgaccgccgataacaagaatgtaatggcggttgggatatttctctgccgaccagcggataaactctgtcaactgccgggaatcggtgatggcaaaatcatcaccgggaccgaatgttcggtcctctgtcatgatgccgtcctgagcggtatatctgcgaacaccgttgtgttggtctccttccccttttccggaagctttgaacaacactgttgccgatacatcatcaccggtagcatcggttgcctgacggatactctcggcgaaaataaggtcatgctccatgtcgccgcccgatatatacatcatcagacagaatccgttcacctccggctcttctggtataggtgacggttcgtctttgtcggaacaagatgacaatcccgacagcgcaataatcaacgccagtatatgattgagatatttcttcactgtttctgggttttagaattaaaaaatatataatccaattcaatttctaatcagaatgtctttatactcggtggttgtctgttcttccaactccgggttgaagttttccgaatagttcataatcattgtattgtcgttgtcttccaacgctatccggaaaaatctcggttcaagttgtgcctccgagtcgaagtaaaagacggttcctgtttgttcatgaaacctccacctcatattgtcatttttccattcttcagagggccagcgggtataagtgctgaataatcctgattccgtgtattcgctccagcactccaagggaagattctccgttacttccttccattcgccattggctttctcatagcgtttggacagcgaccacttaccgaccattctttcaccaagagtcttttctgaatcattgacacgggaaagccgaactttttgtttattctcgtcagtatcgccgacaagttccaatatgttgtcagaaagttgataaatctcaagttcttctccattccaatcaatcttattcccatcctttatactccattggcctttattcaatgctgcaaattgtccaaaaccgcccactaacggcatctcgccattcgacctgaacaccatactctttacgcgaaaattcgtatatgacgcagggagccactcatgaaatttcttaattaacacgtctttcacctcccatcttccgatgatgtgttccgaaatgggggtgagaatctcacctttctcctcataattatagacgaaatactttagactctcatagaaatcacgccaacctgtgagcttgtcgaaacggcatttgcgataaagttgccctcctaactccccatcatactcattcaaagcattgaatacaagataaatgaaatcatgctttccattggtctgtcgatgtgtcacaattatatccgcaagaatctcgtcaagtcgatttatgtatggagcgagactcatgtttccactttgcacataagcggcatgaaagaatcccactatatccaatgtgaaaattgggcgattatattcaaaaaaatcgtcttcattgccgacatacttggagtagagcgctcttccataaccttgaccgtagggttgtccatacacagccggggcatcggtagtgaagtttacatcttccatggagttcttcatcgcatcgataatctgtcgcatagcctcccaaagaggagtcaggtcacggattcgggaaacttgtgtcaccattccacattcttcttggttgtgaaactcctgccaaaggttgatggcgcggtgggcggtacgtgcaagagcctcttctacagagcgtccctgcagcaggtcgcctataagcgaagcatagtcatagccaaagtctggcaacatgaaaggagtactgagcagatagtcggcagtaccttcccattccgcgagcatttcaatatttccttgctggcatgagttgaatataagagcgtcaagagtctggcccgattggcggatagcgtctcccaattgtgcggatgtcatatatttacggttatcatagagggtagcccgcgttttagactcagtctcttcctcataaatttcactaaatggataaaacacctttccgtgtccgccaattacaagcagataatggcggttggggtattgctccgccgaccagcggatgaaatccgtcagttcctttgggtcggtgatgggaaaatcctcaccgggatcgaatgtcgggtcttcggtcaaaacgccattctgcgcggtgtaacggtgcgtgccgttgtgcgcttcgccttctccttcaccggagtttttatgcagtaccgtaacggcaacgttgtcatccgatactgctgctgcttgccgggcactctccattaaagtaacatcatgttcggggtcgccgcccgacatgtagaacatgaggcagtagccgctcggtgtggggtctggttctggaaccggagcaggttcgttgtcatcgctgcaggatgacagagccgccaatgaaaggaggcaggcgacgagataattcaggtatttgttcatgttgttcattcttttaatgtaaacaatgtattatttaagattctattttatcgtctttcttcatccacataccaagcgcctttgccgcttcttcttccggcatcacttccgatgatgttcacgatgttgtcggccggcaggccgttaatctggtacttgatgtcttctgccatacttgaattcttttatgggttctctgatttcggctagaactcgttgatgctgaggaaattgccccagcctgtttgccggtggaacttcagcatcgggtagaggacggcatagtcggcatagtcatactgttgtccgtttgcgtcctctatcacgaagtcgttcctgttgtagtattcggcaggcatccaagtgatgcctacggtaaattcgggtatgatgccttcgttatggtggcttgcacgcacgggctgcattttctgcaaagcgttggacagcaggtaggcttgggtggaaagcgtcccgttcatgcagtagttggcgatgtggttggcataatagtcgaggtcgatggagtaactgccgggatactggtcgaattggtagatggaatagagttggtaataatcgaacagctccaaggactcggcgtcattctggcagctgttgcgttcttcgatgagcgcgtcggtgaagaggcgcatctcgtcgagcacgggttgcaacatgcgggtgtcggtcagcgacaggtcgtacgagttgttggtatccagacttttccacaactccaccgtcagcggaacatattcctgcatggcgggcagcacttcgctgtgttgctccagtttgtccatcagccggccgtaatgaccgccgtagccgggggtgatgtgcgaggcgctgaggatgtagtccgtgtagtcggctatctggcagatgttctccatcatgttcatcaggcacacgtccatatagatgaggtcgaagtgcacccccgaccgcttcagcccttcttccagctcgaagatggagagatggctgtccacgccagcttccttaacgttgtcgtcgaacaccacgccgcgtgtgctgctgccaggccagttgctgggctggtcatagacaggcgtgaactccgagccgtggttccacagcacgaggacataccgcttggcgggcatccgctctgccgcgtcgctgatgaacgaggccaggtggtcgggattgtccagacggtagtcggcatcggctatgcgctcgttttccatacctgtgggcgtgaggctgtagagccgcgtgccttggaactgagcatcatcgcccgtttgataggggactgagaatttcaccagtccggtgaactgcaccttgtccgaatagccgtagccttccacttgcgagaggttgtagatgagggcatcatccaagtttccgccgccgcatccgtagagcatgacggtgtagtcggcgtcaggttccggctccggttccggttcggcgctctgttcggtggtggggtcttcatcgtcgctgcaggcggtgaagccgagcggcagggtggcgcacactaaccacagcaggaggtgtgcgaaggtgaatgtagttgttttcttcattgtgaatgagaatttgagtgattaaagaatatgtttgtcaaaaacaatactttaccccagcctgtattgtgaaggtggtgttgtattgcggttgtttggtatgtttcatataatccttggtcgtggaggtcagtgcatagtagcaacggccttccgcttccagctcgatatgggggtggatacgatagcacacgcccacgccgcccaccagtccggcatcgaaacggttgtcgcgtttggagatgaattcataccggcggtcgtaaggtgcaaagacaaacgactctttttcggctaagaaatcatctatcagactatcgtaggttctttctgtacctttcacccggctatccgcccaatagcccatgtagccgccggcatggaggaagccacgtaacttttcaccgccgaaagagaagcgtgccattacgggcaacgagaggtagtggtcgcggcggtcgcggaagccttggtcataggcacgttgcattgagtagcccttttgcagatatacaaagtcggcacgtaccgccagccagtccaggatgccgtattccacgggaatgcccacggtcagcccgccgcgcccgtcgaagttgaagtcgtatgcatattgggtatcgatgctgtactggttgtaagcataaccggcgctcactcccactttccactgcgctgctgcccggtcgggcaacaggcatcctgccagaagcagcaggctggttactatccatttattttgtttcatatcttttttcttgtttatttttatgtcttaatcttgttattgtctcattttttgccatgcaggaagtcgatggcgtattccagttggctgtctatgtgctggccggtaaattgttccacatccagtggtaccgtgatgtcaggtgttatccctttgccttccagtatttcgccttcggatgtacgtgacatcgatgtactggtataaacataatagcttacacttgcacaatccgggtcgccaaactgcccggagaaggagaagtgtgtttcagaagtcaagggaccatgacctccgaacgtgcgtgtgcctatcaccgtggcatagggcaatttcttgaccggctctgctgtcatttccgacatgctcactgaccaactgtctgtcagcactaccacttggcggtcaccgatacagtcggtttcgggcagtggttcctccatttcgagcagttcgcctaatttccgttgcgtgatgacttgcgcccggaaaggaacccattcgccgtagtccagccttcccattcccatcttggttcttgtgtcgaacacgtgtatgtcttctttcaacagcggtcccaatacggtgaacatgtcccacaaataacctcccccgttgctgcgaacgtcaatgatgactcccttgatgttcgggttgaacaagagttggttggcgtattcgcgatagaccgcggcggcagcctgcgccacctcttcgcccgatttattatggttccccaactgggcaatgatgctgaagttgctgaatcttaggtagaggatgtcattgtcaataacgtaggtgaacatgtggtccaagtcgggattggggttattatcgacgaactcccggtcgtgcgtgatgcgtccctccttcttcagtttgtcacgatatacctggaagccttcgcgggggatatactcctggtagtcttcccgtttcttcacctccattgcgccggattggacatagaagagctgctccgtttcttccggacctgccttcacattcctcaactggactaacatgtgatggtcaataaacgaaccgcatatctcttcatacagtttctgcaagtcggcggtaggaaccgcttcctgcttgtccagctccacgaagcgcggacggtattggctgtagacggcatcccaatcagtcgggtctgcctcccaaaacacatagttctggttgattccatgccagattgcatcaaactgttcggtcagggacttgtcggcagtaagtgcgccgggctgtatcacgtcgtctacctcgtcgcggcaggcagtcagcaacgccagtagggtaacgatggcgaaagccgacataaatttggtagtataagtcattcgtttcataaacattattgtttgctttttgagatatctgtacattttataagttttcaatgctttttgtgagtatttcatttcatatagtcatcctttctttcggtctattccacaccgttgatcaggatacggatctccatgtcgagcaggaactggaacgtgtccttgtccaagggattgccatactgaggaaagctatgcaggatatagttcgcaatggcggcatcagcgtcagccgttatgaaaccggctgtcaattcgtctggaatgaagggactcgcctggaggacgaacgtgttgtcctcgcccaccgtgttgatctcgtctatcccaaagttgtcgatgaaaacaccgtggaagtcgatgcttgtcggcctgcgcgtcagatgcgaagccatgtccgccgtcagcccgtattcggcagcttcggcactcaggtcgatgacgtaatcgatgtcatcgcggttggcgttcagctctgcaatcggcatgtctcggcgaataataaccgtgcgcggacagtaggtgatgggcaggtcgataatcttctgcgtgccgccgaagtcggtgatcgccacttgtgacgcagtgctcaccttcttctctttgccctcttcgagcgaggtccacaactcatggtctttcttgggaatcagcgacacgtattgtttctcgtgcagggtgagccaatcgagggtcatcgcctcgccctgagactcagccttcgtgatgaagctgatatcgtagacccactccccgcccgaggcattacgataagtgtttacgtccgtgtagagtatgtagggattaagctccccatgcgcggttcgtagggtctgcaccagcgagtagcgaaactccaccccttcgtccgccgtggggacaatctgcacgggcaaaaccggcgagctgactttatgagccacgcccgctgcatcggtatagttcatgacgaggtagaggtccgaaacgttgcggaaattcccttcaccctgggtcttgatggtcacaatccactggccgtcgagaatctcgccgctaccgttgcggtcgggttccactccggtgattttataacagtcggacggggtaacgtaagaggcccgcgactgggcagagaaggcacttcgagtaggtggtacgagcaggtaggtgtcgctgttctgcaagtcgagttcaagattaccttccgtaactgccacgcctgaagggttcacccggaaacgcagctgaaatgaggttcctttcaccgccgtgactgacacggcgtccatgatgacgatacccgtgggcatcggttgcttgagcgcatccacgtcgtctttccactcgtctttgttgcaagcggccagcatgagggcgatgaagacaagaaccgatataaatttggtggtataaatcattcgtttcataagcattaattctattcatttacttcgttttcattcaaattgttttccggtatctgcatatcgtccgatttgatgttgtaggagttttgctccaagagtttccctacttcatccaattcttcctgtgtgatgtgaagcacctgtttgttgcgctcattcagctggcagacaataccgtgcgtatgtttcagcatttggatgacgttggaatgtatggacaatacataacgcacgtcgtaccgttcgaggagtgcctttgcggccttttcggcatcggggtaatccatgggcggacattcgtgccaataggcttgataggccttttggcgcaattcttccattctaaggtactctttgcgacatacatccaggacactatagcagttgcctatccgtcctattaccttttcgtcgtccagacattgccacacttcgaaactgttggagaaaatgctgcttgtggtatggtccgtcatcagcaaccggcgtgagccgaatgcattgacgaacatttgcagcgagtcactccccatctggccgagccggtcgggcataagggaagcggcccgtgtgaaaagcgtatcgtactgttgcaattcatccaaaagcgtctgcatatttcgggtggatgcatccaggttgtgcaaagtaagcatcacggttttccgtgccatttcggttttgttccggttttccaaataggaactcgtaccaaaagtcagcaggataccgatcaaggtgcctacggtacacccgaccgtgttcttccaaaaatccttatcaaaaaactgtttcatcgcctggctgtctgtttatttgattacgattttgaatttcagattggcacaagaaggattgtatgtcttgccattgcattcccacggctggcggcaacgcagtacgtagtagtaggtgcccggggcatagttgtatcgggcatctcctgtcaggttcacgctgcatttggtgttgccttcggcatccatgatttcgagctgtgtctcaatgaaaggcccatcgtccaccgatttcccgttttcgtccaacagaccaagactttttactttgaatccactcttttccaatatgcccatttgtctgagtttatgggttacatcaatgtcgaagcctttttcaaagtcagggttgcccaagtcggatcgcgacaaggtcagcgcatcatcttccacggttgcctgcggtgcacaggcgataactgtcagtggcaggctggctactcggctgttcttggaggtcagctgcacgttgaagtctaacgtactgtatgtcgggatggcttcctgtacctcttccagcttctcggggttcacattcagcgtaaagccggtttcttccgtcatgggaattatattgaagtggacggctcccactttatgggacactgctccgtcaaccaccttgatgtttttgctgtcgatcaaggcaaggtcttcctgtttctctgctgcgatgactaccggcagaccggtttcatacaggttttccttatcagcactgtagtagttgaatcctttgggattggcaagggtgaacttgttttctatagtgtacggatcggttacgacaagctcaacttcactggcagctccgccggtctgtctaacggatagaatgactgtattctcctgcttgatctgcgtgaagtcggttaccctggcattcaacagccatttgccccctcctttggatgtgaagccttgcgcctcgaacgctctgttttctcctatgatttttacctcgttcacttgggcgttttcggggattacttcaaattccaaggcgacatcacccacttcattcagttcgtaagcggatgcacacggctgtgcggcttcaatgactgccggtgcatcatcatcgctgcacgacggcatggcgcaacagatacaacctgccaccagcaagacagacacatttctccataaattacatattctcattctgattcttattttagttagtatgatattatttctttgtgctattgtcttcatgcttttccatgcacatggctcaactaccaatgaaataaccggaacaactattgggacaatgagcgttaatcgttgtttataaactgtttactaatgaaatggcctcggtcggacagactaacgtacaaagcccgcaacccacgcaaagcgatttgtcaatcatcggagtacgtttttcccatccgatggcttgatgtccgccgtcaaggcacgagatgtaacaacgcccgcaatgtatgcaccgtcggctgtcgatctcgcaatgaagtttgcgttctctgtctaactgttccggctgaactaagttgggcaaagccaatccgcgcaactcgtcaagcgaagcgatgtcgtgctgtttcatataaatagaaagcccttccttcaaatgatcgatgatgcgataaccatattccatcactgatgtgcacacctgcaatgccgtacaccccagcaaaatgaaatccaaagcatcttgccaggttgttattcctccaataccaaacagagggatacctttgagcggtggataggaggccaggtcacgaatgaaacggagggctatcggtttcaccgcctgcccggagtaacctccaacagctgattgtccgcctatatcaggataggaagaaaaattttcagtattgatgcgcgtaatgctcttcaccgtattgatagcggccaaagagtttgctccattggcaatcgcagtcattgccggaagttccatattgcctatgttgggtgtcatcttggctatgataggtaaacggcttcctttgcgtgtagcccgggtatagagcgcaataagatcctgatcttgtccgatatcgcttcccaacccctgcttggccatctgaggacaagagaaattgcattctatcaagtctgcaccggcttcttctgccatgcgtgcaaggacagtccattcgtcgcaatttctacccataatggaagcgataatgaccttttccgggtaacgttcctttaaacgacggataatctcgaaattctcttcggcggaatgaggcgacagctgctccagatttttgaatccgcagaatgaaaagggatgttctccgggaagcgcatcaaagcggggagaaacttcccggctctgatagaaactgattgtcttatatgatactcctgcccatccggcatcaaaagcatggcaacacatctcgaacgacgaagccactggcgatgaagcaaggaaaaacggattttcacatctgatgccacaaaagttgaccgacaactctgcttgtgtgctctctcgtgatatgtttttcatttgggatacatatctgcaaatttcctgtattcggattggagaatctacccgtccgcgtgcgcaggctttttcacactttgcatcatcacaatgaaggcaggaaacattttctgctgaccgcaagtatgctccagcctcattcttcaaatgtaaagcatgtataattccggccgggaaaacctttttctgacaagctatgtcacaaataggctgataacacatcagacatcgtgtcgcatctgcaattcttgtcttgttttttgccatgatgaaatctatcttttattcttattacttaatatcaaacggttatttcaaggttgcctcgcctgcttcattccgtttattagctaatgaactcagtgctgtacctgcatggttgccggtgcttcgtcgttgttgcacgacggcatggtacaacagatacaacctgccaccagcaaggcagacacatttttccataaattatgtattctcattttgatcctttttttgattaatatttgttttacttcttgttgttttattgttctcgtatcattcccgcacattatccgatcactaaaaaaataatagacaccaccacaattaccaatgagattatcgtcgtgactatttgaataatgaacacaatatctgtgtttatagaaaagaatggtaatttacttcgtttcataatgactcgggatgtttttttaacctgggcaaaaataagtgaactgttcgagagtgtatgtcgcaaattgtcctagtatatctcaaattgtcctagtatatctcaaattgtctatacacgttgatatataatttgttatgatgcctactcaatgtgggtgtaaactggaaaaacatagcgaaaactacaaggttgaagagatgatcttttggcttaatcaagacggtttattacatttgccaatgttttaaatataataaaaatgaaattgagttgtttcttggtattcttcctcctttgggtggttaattcttttcgtacgagtgccacggttcccgatagcctgctgaccgaacgtacgatccgttctatttatgtaaactatccggatagcgctttacgactgttggacgaagcggaaaaaagtccggcttccggtatcattccctttcggattgatctattgcgagcgatgtgttatgaaatcaagcacgacctgactgccaaggaaatctgtgtgcgccgtgcgttgcagaacgactcaatacgtttggtaccggagcgtaaactttcatctatagcgatgctggcaaatatcttggaaagacagaacagatatgaggaaagcatcggtgtgtgccacgaaggtattgatctggcacgcaatctggcatgtaaaaaagaagaatcagatatgtactccgtaatggcgcgcgtctgcataggcatgacaaacgacgaaatggcacaggagtattttcagcgggcggtgaggctgctggaaggaacagatgatgtgcgtgaaatgtctcgtctctcgactatttatggtgaatacatgtccttctatatcaatcggaaccggatggcggaagcaattgaaataggttaccgccgtgaaaccgtcatacagcgtatgagcgggctccccggacctcctccaggatatattgaccagcaatatggcttcctttatgccaaaatggctgtgctgttgcacgatgaaggtaagaaagaagaggcaacagaaatattcaggaaataccaatctaccagcttttcgaaaactcttatcggcaaacagtatagtgtaccttatttgctgaatatcaatcaatatgcggaagcggcagctctgagcgatacatgcatttctgcttttacaaatgataccgtaagctatgaatatctgattttgctcaactatcgtgcgcgagccagccgtggaatgaaacgttttgacttagccgatgtcttcacccaacgtggctgggtggtgcaagatagcatttatacccgcgagagcaaaagtaaggcacaagagtacgcttctaaattcgagctgaaaaaaaaagagttgcagttggccaaatctcacgctttgtccgaacggcgtatgcttctgttggcaggctcgtgtgtcctgacggttctgctcattatcatcctttggacgacttttgtgaatttgcaaaaaacaaagatgcggaaccgtatcgcagccaaacagatagatgaactgttggcgcaacgtgaagaattgcgtaaggtgtttacacaaacaagaaatactcatgaaacaacgaaagaaatcggaactggttcatccctgcctgaggaagagacattaacagccgctacaaaaacagatgtggcagctccggggacaaatagtgatgaaaattatgctaagttcatgaagatggaaagccaacttatcgaacaaaagctttttttgaaacccggattcgggcgtgacgacttgatacgtgtcaccgatatcaacaagaatgatctcagccccctgttgcggagatatgcgggctctgacaatttcaacgattatctgaatggtctgaaaatagagtattccattaaactgatgaaagaaaaaccttatctttctgttgacgcgattgccgaagaggctaatttcaatagccgtagcacattctatcgagcttttgtaaagatttcgggaatgacgcctgcacaatatatgcgcactaaaatagagtaatcatatctgttccttgatgttataacgaatgccttaagcattaattgttgcaatacatttttcttttctagaaaaaagtatactttcagtccgtaatttgcaaagctgttatggcaggtaagacatcttaggcgattgatattggaactgttcatcagtttgcactgcttggtggtgttaagtaacgctaaagatctaacaagactggaaacgtactataatgtcacaaatctataactaattattcatgtcacacgctacctttgcaaataggaaatcaaagactattatcatgaaaaaactatcatttttattactaagtttttgcacaatcctgtgcatgtacggacaaaaagcacacgaacttcaatcaccggatggtaacctccggatagtcattaacctttcagataagattcagtacgacgtgatgtacaggaacgacatattgctgcaacaatgtgctcttcgattggaagtaggtaaccaacaattgggaagcaatcctaaactcacaaaagtaagcagaaaaagcataaacgaatcacttacaccggtaattccactaaaatattccatcgtatccaacacatacaatcaactactactgaaattcaaaggagattattctattgaattccgtgcattcaatgacggagtcgcctatcgtttcattacagacaagaaaggaataatcgatgtgaacagcgaaactcttcagctaaacttcccggagaattatctgcttcatgtgcagcaaccgggcggttttaaaacagcttatgaagaagagtaccgccacatacaaagtaatgaatggaaaacgtcagatccaatgatactcctacctgtacttatagatacacggaaagaatataaaatcctgatcagtgaatcagatttgacagactatccggctttgttttttaaaagtaatggcaataacagcatgtcttccatatttcctaaagttcctctggaattcggtgaagacggagaccgtagcctcaaaatagagaaagaagcaagctacattgcccgaaccaatggaaaacgcagtttcccctggcgctactttgtcatcagcacaaacgacgaacaattaatagagaataccatgacctatcagctcgcaccaaaaaatgtattgaaggatacttcttggattaaaccgggattggcaagctgggaatggtggaatggtgccaccccttacggagcggatgtagactttgtagcaggctgtaatctggatacttataaatatttcattgactttgccgcccactatggaataccttatatcatcatggatgaaggctgggccatgtccacaagagatccttatactcccaatccaacagtggatgttcatgaacttatccgctacggtaaagaaaagaatgtaggaattgtactttggctgacatggttaacggtagaaaagaacttcggtttgttcgagacatttgaaaaatggggcgtgaaaggtgtcaaaattgattttatggacagaagcgaccaatggatggtaaactattatgaaagagttgccaaagaagcagccgagcatcatctgttcatcgatttccacggatcatttaaaccggcaggtctggaatacaaataccccaatgtcctttcttatgaaggggtaagaggtatggagcaaatgggtggatgccaaccggacaatagcgtttatctgcctttcatgagaaatgcagtagggccgatggattatactccgggcgctatgctgagtatgcaaccggagatctatcgttccgagcgtcccaattcagccagtatcggtacacgcgcttatcagatgggattattcattatattcgaaagcggaattcaaatgatggcagacaatccaactctctactaccgtaatgacgaatgtacacgcttcatcacccaagtgccacaaacttgggatgaaaccattgctctgaaagccaaagttggcgaatacgctatcgtagccaaacgcaaaggagataagtggtatatcggtggcatgaccaataatagagagcaacaacgagactttgaactaaacctgaacttcctgaaagaaggacaaacctaccgtatgacctcttttgaagacggaataaacgctaaccgccaagctatggattatcgtatgaaagagcgtacacttagaaaaggagataagttaactataagtctggcacgcaatggtggttttgcagctgtaattgaataatctaacaattaatccggagaagttttttgaatctcctccccctgagaattactttaacacaaaattattaacagaaatactcaaataaaaaatgaaacgtattgtttttttagattatgtacgcgtattcgcatgtttccttgttattttggtccacgccagtgaaaacttttatggtgctgccggctctacagatatggtaggacctcagtcttatttggccagtgaaacagaccggctatgggtagcagtttacgacggtttctcacgcatggcagtaccactattcatgattgtttccgccttcctccttgcaccgatgaaaaaagaacagaccacatggcaattttaccgccagcgctgcttacgcatcctgccaccattttttattttcatgatactctatagtaccttaccaatgttgtggggagcgatcaatggagagacatcattgaacgatatgtcgcgaatattactgaacttcccatcacaggccggacacttatagtttatgtatcctttgatcagtctttatttgttcatacccatcatatcaccgtggctgagtaaagccacaaagaaagaagagcgtttcttcattgggctattcctgttatcaacatgtatgccgtatctcaaccgctggtgtggtgaagtatgggggcaatgtttctggaatgagtaccacatgctatggtatttctcaggctatctgggatacctcgtattggcacattacatacgtgttcaccttacatggaaccgttccaaacgtctcaccgtaggaggtattctaatgatcatcggagctgtatggaccatttattcattctatatccaggctgtgcccggagaaattctttccacacctgtaatagaaataggatgggctttctgtacaatcaattgtgtgcttcttacaacgggtacattccttattttcacatgcatcaatcgtccaaatcccccacgaattctaacagaagcatcaaaactcagctatggcatgtatctcatgcatatattctggctcgggttgtgggtaacagtattcaagcacactctggcactgcctaccgttgcggctataccttgtattgcagtgagtacattcatttgctgtttcgtaacagcaaagatcatctcatttataccgggcagtaaatggataataggataaatatcaaattgtttatgaaaaaagtgggggctgatctaaagacagcccccaatatttccatcaatcggattacgacgccagtcaatgggatgatatcaaatacactttcgctcagctacctcgcttctcagcatgagggtgaccatttataatggcctattctgccattacaaattctatgattgtccggccttgagtagcgacaatgggtttctttaagttatacttaacaccatttaccagcatggcggatagcttactgcctgttcctaccatcttgacatccaatgtccccatctgataacgcaagtctttaagttctttaaaacccagatctttcatcaacttaaagttgggtgcaaaagttacccccgaagttgaaaatgacatgccaagcaaaccactgaaaaccatgtttatataccccgtagccgaccaagtctgatcatatacagaattccattggccaccctgctgccagcctccatcaaccttgcccgtatcctcattatatatttcataaaagcagttattacccttattgatggctaaatcagcaagattcatcatctccttcatgaagatgtcatctcgtccactcttgctacaggcatccgcccaaaagccattgacaaatggccacacaatctgattatggcgaccgggatgctcctttgagaaacgtttaaatgccggataaatggaaggcaaaccgtattttcccatatataaactccgttgatgatcttttttgcttcctgaggagtcacaacctggaacaaaatagctaaagaaatacccaatccttcttgataagcatgcactttgccatttccatcaatcagatagttcaaacggttctgtttcttatcatagagatatttacgtatattttccttttggatagaggccttttgcttatattccttaatattcttcttatctcctaacactcgtgccatatcagccaacaactcatatgctcgaaaataaatacaatttgtgctcaaacacttgatagtctttgatcctgaatggtccaacacataagaagatttattggtaggttcgtagatgggctcttcatatccggcaataccgtcgttgaaaaccgaagggcctgtgaatagaccgtatttctcatcataggcttccttctccaatttcttcattgtattagcagaagctatataagcttgtttcagaaagttaagatcgttgtttttcagatagaaatcataggcagccataacccagataatctgatcccagtattgatgtcctatcaacttccggtcatcgattgtaacactccagagagaataagcggttttctccggtataagtagactggcagcattccaagcattgatagaaacatcacgtgtccactcaccgccatattgtcccccggctttaatcaaactgtcaggagcatttttatataatgtcttagtggcaagtgtaaaggctttatcgactaacggagtttccgttgtcagttgctgagcatttacttctgccgctatgaaaaaagctgaagctagaacaaaaagacttttcataatattctcgttattgatataatgttatatacttattaaaaaactgcaaactcataaatacgtgtgtccttgccattagcggcctgtaccggttgagtaaccaacagacgcagatagcgtaccttctcagtcttacccaaagaacggttgataacattctgcttgtttccggttacgaagtccaatgtgcgccatgcttcattcgggttattccggccttgcaagaagcagctgccagtgatgtaagaatagctttcctgagcagcattcaccatcttccaaccgcttatttccttttccattcccaaatcaaaatcaatatagttaggaagcatagaggtatcgcaccatttagtattctcgtttccatcaatgagaaatgcaggtttctcatggtcgttggtatatcccgaccaagcaacgatatgttccggtttcaacagattgatcttcagttctgctgtcttctgcaagctggtatcatcttcattggcagtctggaataaagtagatagtgctttaacaggtgcatatggttcttcaaccaatgtagcagcaaaaataacaatatctttattatcgggcaggataacctcagttgctttagcagggatgtcaatggcaaacttgaacatataagtaaactcataagcatgatctccctcagcggaatggcggtgtgtaccgacataggccacttctacatctttcaaatagccttgtgtatggcctgtatgcccccattgtccgatgaaaccggtataagaaggaacgacaatctcctgcaaattcttccctgtctggaatacgcctctaacatcttcttcagcagttgccgcagcagccagtatatacaaacggttataggaatgtccggcaggcagttgcaaggtatttccgctacataacataccattcatttcttcttttgtttccagatggaaaggaacacgattaacagttatatcggcaggtattaattcagcggcataagaataaccggcttcgaaattagcctcccaacgaaattcgttccagctgaaacatttacggtcataattgagaggcagttgttcgcatcgcaattcttccttcttattatcattgaaacggactttataggtcctgatgctgttgggctgtatggagacttccagctgattaccactgaagtccgcacttcctatactcttctccgtaccatctgcttcaacggcacttgtaatagttcctgcaaatgtcatcactgcattttgtggagctttgccacccgtttcgtacacacgcaccacatattcgtccgaactttccgctttcttcaaagctttgatgacaacgttactattgtccgaagatgcgaaagaaaaggctttgcccaatgttccggaatgtttctcggcagtaaaagccttcagacgctgattcaatacttcagactccttaacgacctgcgccttgtccaaaccgccggcatgccctaccaaactataagtgaaagtatgatatcccaggtcctgacggtcctgatacggatagttgttcttagtctcgggtgtatgaagcaatgtcaggcggagtgtatgattatcaggtttatcccagccatatttactgtcattcataatagaaacaccataactgccgtcactatcggttaaatccgcccaatattgggcatatacttcataagcggtcaatatattattacctctctgaacgctgcctatacccagatcgtaggtcgccttttcgttatcaacattcaaggggaattctgctttcagcagtgcattcgttgactgccagtctatctcattgtaaaagtctatacggtcagccaattctccctcgtaaagccgaatatactgacggaacaacgatttgccatggcgcttttctatacacaaagtcttgcgcagggcaccattctcacacagattcattttcacgtcttcagtaatagaaacaggcgcacggtcaatagtctttttcagaatctcccaagctggccaattatatgattcattctcagtaaaaagagccagacgaatagatttgccgtccttaacaagttctttattgtttttcttatcgtaaagcgagattatatctcccttcttatccaatgagattttatagacagagttctccactgttgtttctgaaacaaaagaatctgcctgcttctggcttccggaaagtcggacatcatacacggcatatcctgtagcaggtacagttgcttctatcaataaatacacagttccattccggtaagaaagtaattgggaagcaacttgcttgccttccgcattataaacactgacacctttagggaatttgggagcttcaatcgctacctccgctacatccgtaaccggaaatccgagtgcattgtagaacacaaccggaatacccttgacgcgagtatccattttctcagaaacagcccctaccgaagctgtcagaacacctgaaaattgctttaatgaaagcaattcatcattccacgaaaactcataagcacgtgggatactggtaccggtaaggtcatcatggaattggtggaaaatgaaacgcttccatgcttctctcagactttcacccggataaccggctatacccaaccaatccgctgctacggccgctctttcggcagcatctcccaaaagttcattctgacggttataaagcttcatggcagcttgcgaagtataacatccggttccatgtacatccatcagcaattcaccgttgaaaacgggcaattccgaatgtttttcataaggaagataatccttgaataactgatcgctcgttgcgctgattatttctaacggtccgttccccttgatacctttctctacagaactgacagagcctattgagggagaaccacccgtatcacccgtaccataatagcgataaaccgtattcaatggagtgcgcttagtcagtcccaacaattctttatcttccgacaggtcaatgttattccagcgcttaccataatcatagccatgagcaagcataatagaagaaccgtcaatccccttccacaatccaagcataaaaggatgtttgctctctccataaaaaggatggttacgccagtcgagtttctgtgaagaaaagccgatgagaccgcaatgtttggcaatagtaggcagcgtccagccaaagccaaaacagtcgggcaagaaaatatccgtgctttctgtcccgaactcttttctgtaatattcctgtccaagcaggatgttacgaatggaagactcaacagagggtaccagcacatccgatgcttcccaactactgccactgatatgccagcgacctgaacgcacaaatgctttgagttgctcatattcactgggaaagtattctttcatccaagcatatttgacacctccttcaaaattgaagatataatcgggatacttcttcaacaaaaacagattacgggacaaggtattccaaacatactctttgatggtggtttggacatcccaattccattgggtatccaggtgggcatctgccaccatataagctttcgcttttttctccggttttgcactctgtgcatgcatactacctgaacaaagcagcgcagatgctaataggataactggtaatttcatagtaaaatattctattgtgaataatacagatatttatcaatcgcaaaaatagcggcacttacctaaaagcatacctatatttatgccataaaagtgtaattacatggctatggctgtaaaacgcacaaaaaagtcagaaaagtattactcttttttctatgcttcccaaccatatcctaccataattctctatctttgcaatacctaattagtccgatatacagatatgaaaaacaaacactacttccctcaagtttcactgcttatctgcatcttatgctgctttccgcatttgattcatgcatacagtctacggcaattttcaaacaaaaacggcttatccaacagtgctatcttatccctttaccaggatcatcagggagtcatctggatcggttcatgtgatggtctgaatattttcgacggcaccaatatccatgtatataatcctgtcaacccgacgaaagccccattatccggaaacctgattaacgacatcatggagactgaaaaggatgtattatggatacagaccaactatggactggaccgtctggatactaaactccagacatccaaaagctttacggagtttaaagacaagaactatatggcaaaaagcagggataatgaccttttcattgtaaaagacgacggatatatctattactatcaaccggaaaaacaactcttccaaaagttggaagtacctcaaatagcattcggacacgtattatccactatcatcgacaaaaacaatattctatgggtattcacttcgaataatgacacccgcagctatcagataatcaagaataaagaagagatagccctcacccccaacaatctttttaaacattccgaacagttattatgggcattcgcagaagaagacctggtctatttcatcgataagacctactcactctatgaatatgacttcggaaatcaacagcaatactttattgcagatctcaaagcagaagtcgaaacacgcggagaagtttcttccatcatcaaacaacaaaacgactattacattggcttcaaaagtagcggattgatcgtattgaaatatatgtccgatcagaaaataaaataccagatgcaagatacagaaatccattccggcatcttctgcctgatgaaggacaaatatcaggatattgtttggataggaacagacggacaaggggtatacatgtatttcaatgatgctttctccattaccaatacactgctggatactcctgtataccagataaacaaccccgtacgtaccgtttactacgacgaggaacaaaccttatggataggaaccaaaggaggaggtatattgcgtatcaggaattattctccggaaaccaatgcagcagtttctttcgaccggatttccatcagcaacagtaccttaaccgacaacaccgtctattgctttgcccccggttctgcgaacaggctatggattggaacggaaaacgggcttaactactattcataccagaataaacagctgaaagcgtttacagtgatagccgatggaaagaaggtgaaatatgtacactccatcaacgaattaaatgataccactttatgggtatccactgtaggtgagggtatcgtaaaagttattttggataaagccggtagctctccttccgttaaatcggctaccagaattgttctggatgacgggcgtatggcttccaattatttctttacctccttccaagagaatgattctatcctttggttcggtaatcgtggctatggagcctaccggctcaatgtcgaaaccgaacagctaactccatacaggtttgataatgtagtgaacagtcagacggccaatgatattttcgccatttataaaaatgagaaaggatattggttgggaaccagttccggactacttcacttcaatgaagattactcacattatcatgacagggctgaccttttctcaaacaacacagtacatggcattttggaagaccagcaaaataacctttggatcagcacgaatcaaggactggtaaggttcaaccctaaaaccaataccgggcagacttacgaccgggaaaacggactggaagtcactgaattcagtgatggagctttctataaagactcgcggaccgaaactttattcttcggagggacaaacggatttgttaccgtcaagcctaatgcttatattatggcagactatatgcctcaaataaacctgaagggattatctatcttcggaaaagaatacaatattcatgattttctccacgacaaaaaaggaaagaagatacttcagctggattatagccggaacttcttctgcatcgactttatggcaatagattatataaatggtaacaattactcttattcttacaaattggacgaagtaagcagccagtggatagaaagtggaacatcggccagcgccatcttctccaatcttgcacccggacaatatactttgttagtgaaatacaagaataacatgaatggaaaagagtgcgaaccgcagaaacttctgattcagattactcctccctggtatttaagtaattgggcatatattctctatttcatattaatcgctttgttctgcattcttgctgtttacaggatagttcatcaataccgccggaagcagcaccgcatgattgagaaattgaaccgggaaaagaaagaagaagtctatgagtccaagctgcgtttctttaccaacatcactcatgaattctgtacgccactgacgctgatttatggtccgtgcgaaaagatacttgcctacccgcaatctgattcgtacatccgcaaatacgggaagatgatacagcagaatacagaaaaactgaatggtttgattctggaactgctggaattccgcaggctggaaaccggtcataaggtgctttctatccaaagattatccgtatcggacaaactccggaacatagcggaatccttctgtgaattggctgaaaataagaatctgaactatcggttggatattgaaccggacatcgaatggaacacggatatcagttgtttcaataagatcgttaataacctgatctcaaatgcttttaaatatactccggaagaagggaatatcaccatcggtctgaaagtagaaaagcagcttctaactcttaatatatccaactcaggaaaggggatagcgaaagagaatcttgcaaagatattcgatcgctataagatattggattcttttgaaatgaatggcaaaaattcacggaatgggctgggattggccatttgtaagaatatggttactctgttgaacggtgaaatcaatgtcagcagtattcagaatgagataactacatttacagtcactttaccggaactatcgcccactgcacaggaagcagaaacaccccaaaaagtgtatgaaacaggacctctgaatacaaatacggagcccatggaactggaacagaccactgttaatttcgacacttccaagcacacggttatgatcattgacgacgatccttcgatgttatggttcgtctcggaaatatttgtagataaatacaatgtattatctttcaataacgctgcagaagctttggccagcctggaactgaagcagccggatctgattatttcagatgtgatgatgcctgaaatagacgggctttcctttgcccagaaaatcaagcaaaacaagttatggagccatattccactcattctactgtctgcccttcatcacgaagacgatcaggtgaaaggcattgaggctggtgcagaagtgtatgtgacgaaacctttcaatgtaaaatatttagagaaagtagtctaccgattgattaaaagagaatcggacctgaaagaatattatagttccatattcagttcattcaaagtggaaaacgggaactgtatccacaaagaagatcaggaattcctggataaggtgatagaaaccatagaaaagaatatcacaaaccctgacttatccgttgaactattgagcagtgacctgggctatagcacccgtcagttctaccgtaaattaaaacctataacagacaaatctcctgctgatatcatcaaagaatatcgcctcacaatggccgagcgactgttgctgacaaagaactataccattgaggaaattatggacaagacaggtttcaataaccgcggaacgttctataagttattctcccagcgtttcggtatgccaccacgccaatatagggaacagcagaaggatagtgtgaagaaagaattgacagatatggattctatcaacgaatagcgtcaccggataagaataaaaaagggaagctttacttcccttttacaatcctcttaatatcattcaatttattcaatgcctccagcggggtcagattattcacatccagattcaaaatctcgtcacgtatctggcagagcacaggatcttccaactggaaaaagctaagttgcatgccgccacgcgtctctcctacttccgccatcggcttacttgcaataccttgctgacgattgtccgcctcaagctgtttcagaatgtcattcgcacgttttacgatacttttcggcatacctgccatctttgccacatggataccaaaggagtgttcactaccgccacgttccagtttacgcaggaaaatgaccttattatccacctccttaacggaaacattgtagttcttgatacgcttgaagcttttctccatctcgttcaactcgtgatagtgcgtagcaaacaacgtacgtgcctttgctttagggtgttcatggatatgctctacaattgcccaggcaatagaaataccgtcgtacgtagatgtacctcgtcccaactcgtcaaaaagcaccagactgcgcgaagaaaggttattcaaaatatcagccgcctcgttcatttccaccatgaaagtagactctccgacagagatattatcactggcacctacacgggtaaatatcttatctaccaaaccgatatgtgcactctcggcaggtacgaagctgccaatctgcgccagtagcgttatcaacgccgtctgtctcagcaatgcagacttacccgccatgttcggaccggtaatgatgatgatctgttgcgagctactatccagcaccacatcattggcaatgtacttctctcctatgggaagttgcttctcgataaccggatgtcgtccctggcggatatccagaacatcgttatcttcgatgacaggacgtatatagttattctcacgtgccacattggcaaaagacagcaaacagtccagacgcgcgatctggtttgcattcacctgaatggcaggaataaactcacttagagcctgcaccaattccatgtagagctgggtttccagtatcaatatcttatcttcggcgccgagaattttctcttcgtactctttcagctcttgtgtaatgtaacgttcggcattggccaaggtctgtttacgtatccactcctgtggtaccttatccttatgtgtattgcgcacttcaatatagtaaccgaatacattgttgtaaccgattttcagactgggaatttcagtcagttcactttcccgttgctgtatctgtagcagataatctttaccggaataagctatctgacgtaattcatccaattcggcattgacgcctgacttcataacaccacctttgtttatcagcaacggaggatcattattaatctctttttcaatgcggtcgcgaatggacttacagatattcagttgttcaccgatacggttcagactagcattatccgcctccagacaagcttccttaataggctcaatagcctgcaaagctacctttaatgcaactacttcacgaggagaaacacgtcctacagccactttagagatgatacgttccagatcgcctatcaaatgcaactgttcttcgatcagttctttgaaatccggctgacggaaaaaatattccactacattcaagcgttcattgataggcagtacatctttcaacggaaacaccaaccagcgcttcagcaaacgggcacccatcggactgatagtcttatcaatcacgttcagcaagctgctgcctccatcattcatgctgcctatcagctcaaggctacggaccgtgaatttatccagacggacgtatttatcttcttcaatacgtgccaaagaagtgatatgcccgatttgggtatgctgcgtcatgatgagatattgcaggatggctcccgaagcgatgataccattcttgagatgctctacaccaaaacctttcagattcttcgtttcaaaatgtttcagaagtttctcccgggcggtggtctctgtaaatacccagtcgtccagttcgaaagtaaagaacttacttccgaaatttccctcgaacatcccccgcttaccacgttcaaaaagtacttctttgggcgcgaagttattcaatagcttgtctacatagtcaaaaggcccttctgctgtaagaaactcacccgtagatatatcgagaaatgccacaccgcacgctcccttaccaaagtgtacggcagccaggaaattattctcccggtaattcagtatattatcattgatggaaacaccgggagttaccagttccgtaataccccgcttcaccagtttcttggtcatcttcgggtcttccaactggtcacagatggccacacgcttcccggcacgtaccagcttaggtagatacgtatccaatgcatgatgagggaatcctgccatttcaacagtctttcctttaccattggcacgcttagtcagggtaattcccaggatttcggctgcaacaacagcatcggtagaataagtttcatagaagtcaccgcaacgaaacaacattacggcatcaggatgcttggctttcaggtccaagaactgtttcatcatcggagtaaggacaatatcttcttcgctcacagtagttgttctttataaatttattaatatgcaaaagtgcagcttattttcgcagccatgcaaagataattcttttttagaaaacaagtactgaggggactcaaatccttagtaagccttaacaaaaacaacacttttactaaaacatgttataaaacactcttttttatttgttttatttgcagatatcccagaagtccgtatctttgcactgtgtttttcatagtattagatttaagattaacaaaggttggagtacagcggtactcctttttttatgcccatactttacagggaggttcacaaaaatgccattttgattgaagtattgccaataataccctatttttgcaatcgccaccaaagaaaataccttgtaacattatggaaaacagaattcatcgtacagaaattcagatatatgtatccccctttctcattgtcatcttcctattaatgagcatttcctcatatgcacagcaaataatagccaaacaaatgccttttctggaacagctaccttccaatgaagtaatagacttgcatcaggaccagaacggattcatctggttaggaactaaaaacggcttaggacgatatgacggataccaactccagactttcaaatcagattttaatcagccgcatttattaactgatgacttcatctggtgttttgctgaagatgataattgcctgctggtaggaacaagacagggagttaatttggtggataagagtaactatcagatacggccgttccctgatgaagaaatccagaatacatggataaacttcatgttggtagatagccggaaagaactatggatatgtacccgtaatcaggtttctcactacaattccgactattcgttgaagaagcgctacggaaatttaatcccagcggttcccaacaatggcataaactcaatatacgaagaccatttcggcaatatatgggtatgtacatggggaggaggcttatacaagtatctcaaaaatacagatacattcatgagttttcctgcactcggaacaaagaatactccttttaaaatattccaggacaaagatgaccaatattggatattgacctggggagacggtatctaccgctttcatccggatgcaacggaggacaacatgtacacacatcaagaagtcttcaatgaaaaactgcacttgcctgaaaccgcattcttcagtgtagtacaagatgatgtttacggctatatatgggtattcggctaccacgagctttacgctttcaaagtggtggacggacatctgaaaaaagtggatctcagctcgtatatgttcgattacaataaaatgttcagccagatcatcaaagacagggaaggcaacctttgggccggggcttacgacagtggatatcacttgctaatgggaaatcctgccataactaacaatttcctgcccaaactgaaaaagcatgtaggtttcgacacgaatataactactctgggcattgaccccaacaatggactctggtttaatcaggaacgttggggactctgctggtatgacatagagcaggacaaattctatgactattcgaataccaatcccggagtgcataatgtaggatatatcctgcgttcgaaacaaccgggagaattctggctgggatgcagagaccagcccactctctacaaagcaaaactaaacagtaaaagagaaatcgagtacctactggcaaaagacttatatacaccaaaaggtgctacaggcaacattacatccatctatgaagacagtaagggaaatttatgggtagctaccaccggacagctctatctaaaaccggacggtaaagatttcattatccccgaattctctctgcccaacattacatctattgcagaagacggatatggtaacatctggctggcaaccgaagattccggtttacataaggtttctttaggagataaactggaaccaattaaacaatactcaacccagaattcatccttacccagtaacaatattgataagatagtcatccaggaaaaccacctatggattgccactactcaaggttccatcctgcaaatggatctcaactcagagacaatgaaggacttcagcaactcatgtggaatgaccggacagtctattttagggatgaaacatgacaggaataccctttggatactaacaaaccgacaattgactgcctacgatatccagtcagatagatacattcattattcaaattcagacgaatccgttcagataaactcgttcaagaaggacgtcatagacctgttcaacggcaagctttatgccggtgggcatggtggctttgtatcgatggcttcctcaaaattcccatctaagaagatcaactccaacccggtcatcataacagatatcaaagtatccaataattctttcttcttcaatccccagcgccagtcgaaagatttatcaacccgaagcgtctggttagagcccgaagataacaatcttgaaatcttcttctccgctcttcaatttacagcaacatcgagaataagatacgcctacaagatggatggcgtggacaaggagtgggtatacaccgaaaccggtaaccggtcggctttctacaataaaatccctaaaggataccatactttcaaagtgcgctctacagacgaatacggctattggaaagacgacgtcacagaactacgtatctataaaaagccggcttggtacgagacatggtgggcatatggtacctatataactctcaccatcctgattctttactccatcatgttctattacctgcatagggtaaggcagtccgaccaggttagattccaaaaagaactgaccaagactaaactggaatatttcacccatataagccatgaactgctcaccccacttactaccatcagctgcgtagcggacaacctagaagaaacaaagttttctccacaggaagatgtacatatgttgaagagtaatgtgctccgcctaaaacgcttaatccagcaagtgctcgatttccggaaagtggagaacgactcgtttgtactcacccctacctatggcaatgtcagcagctttatccgtgaaatctatcacacaggcatacgaccaatcatcgaaaagaaaaacctccatttcagtcttcatctggaagaaaaagacatttggggatatatggactttgacaagatagacaaggttctgtacaacatactctcgaatgcggccaaatatacacctgccaataagaaagtagagctgaatgtatcgactttgctaaaaaataatttccgattcctccggatagaggtgcaggatgaaggaatcggcatagaccagaaagaaatatccaagatattcactccattctatgtgaacaaaacagcttatgcacctcaatcaaacggtgtagggctttcattaaccaagaaactggtgaccttgcataaaggagacatccaggtagaaagcaacatcggagaaggttccagatttacagttctaatccctatcgaccgggattattatccggaaataaaggacattatcgaaaccagtgaaataccgtcaacagtaccgaatgaagcaacagaagatacagaagagaaagaaggtacagtattgctggtagatgacaatgaagaattcctgctactgatgaaaagaaagttggccacacactataatatactcaccgctacaaatgggaaaacagctttggaaattgtaagaagcgaagatgtagatctgatggtcagcgattatatgatgcccgaaatggatggaatcgaactctgtgaaacaatgaaacaggacatcaataccagccatataccgatattgatgcttacagcaaaaaattcagtggaagaccaagtgagatgtttcaatgcaggagcaaacggatacctgacgaaaccattcgatatgaaaatgcttaatgcacgcattgacaatctgatgaaatccaaccagaagcgacaagagaagttcagagtcgatacggaaatcaatgttgtagcactggaatatcagagtactgacgagcagttcctggaaaaagctatcgaatgtatagagcaacatctgattgaaaccgaatttgatatagatacttttgcctcggaactcaacgtttccaagtccactctaaatagaaaaatgaaagcaatgaccggtctctccccagtagagtttattcgcaacatccggcttaaacatgcgtgtacactcctgaaaaagcctttcattaatgtctccgaggttgcctatgcggttggtttcagcaacccaaagtatttcacgaagtgttttaaaaaggaatttgacgtaacgcctaccgaatatcagaaaaaggaagaagataaataaacgacttacccgttggcggaggttattgctggagggggttatgaggtaaatgagtatcccaattcccctcctcctgggaggaggggtgcccggagggcagggtggtaggtaaagcaagaaatacctatgaatcatatacctaaggaattcttttctcacctaccacctccccctacgggtactcctcctccggggaggaggagaattaagatagtattgctcatcattttattcctttcattttccgttttgaattcctccaaccaattgctactttattatttgctttcccctatactacaacaaaattcctctccagcaacaagtgtatttttgacgcagttaaggtatacaaataacgcattccccgctctgtacccctttctgcctcatttgagtactcctccctgttcttttctatatttatttgcatcggccttaaagaccgcaaaccaataacaaggacaaagagtttcagtgaccaatccttttaataataatatatatgaaagacaaatttcttaaatcaatccaaagaaagagctggctgttgctggccttgttcttcatcagcagttgtagcaatgaagacatcgtgaaacatcccgtcatcaccaacaagtatgatccctcaaagcctcaggcactgaccggctttatcccggaaaaaggaggaataggtgacaaaatcattgttcagggaaacttcggtacagacctgtccaagatgaaagtgatctttgccgataccaaagaggctaacatcatatcaagtgacggaacttctatttactgtaccgtaccaaaacaaccgggcggtaataattctgttaaagtcgttgtagacgataaagagcttaccatcgacaagacatttgcctacacacaggtacagaaagtttctacagtttgcggaacctacaataaaagaggagataccgatggaaacatctacgatgcactattcaataatgtatttgctgtcggtatagtggcaggagataacattgtagcagtagagtcggacaaacaacgggtacgcctgatttcagaaagcgagaacctggttacaaccctgataagcggattcaaagcaggtaaacctgcaatcaataaaacccgtgataaaatgtactttattgatgtcaaatcagctaaagtatatatcctgcgccgtgaaaatagctggcagccggagctattgcgcgaaggtatcaccgaattatccgccaacaatggtgaaacctggtcctgcattattgacgatgaagaaaaatacctctatacaagaaatcacctggggatcttcgtacgtatcaatctgacagaaaaagatgatagcggacagtacaaagtagaaaaactccttgaacaccgctgggactttgaagcttgggtttccgaccattgtagctatctggcttatagccgtgtagaagattgcttctattttgcagaagacaggacacatgctgtataccggattaaacagaacgctgacggcacatggtcggacgaaagatatgccggaaacggctggcctaaccaaaccaatacggaaggttatcgggaagacatacagtttgcctggccaaatggagtaactgttgacaatgaaggcaacatatatgtagtaaacgcaggcggacaatccatccgaaagatatcctacccggatggctacgtaacaatcgctgccggcggcaccatgtcgggcgagactgaaacagacggactcccactggaatgtacattcctatatcccaaagatatagctatggattctgaagaaaacttctatatagccggaggtgcaggattgaatgtgcgtaaactcgctatagaataaactccttcccgtaaatcaataaataaactaatatatgaaaaatagatttttccttatactttcattcctattgcttgcaagtgtgtttccacttgccgcacagaatggtttcaccgtatccggtattgtgatgacggagcaaggtgaagaattacccggtgttacgattcaatataaaaacaatccctccaaaggagctatcacggatgttgatggtaatttccgcatggacaatgttcccgccaatacagtattggtgtttacctacataggttatgcaccccaggaactggtggtaaacggaaataaaaccaagcaaaagattgcactgaaagaaattgtaaatgaaaccgatgaggtagtgattgtaggtcgcggaactcaacgtaaaatctcggtagtaggtgcggtaactaacgtaaaggcatccgatttacaggttccttcatcctcggtaacaaacatgctgggaggtcgtgtaccgggcatcattgccgtaacccgaagcggcgagcctggcaatgacttttctgaattctggattcgtggtatcagtactttcggtgcaggtgcatccgctttagtgttgattgacggtgtggaaggcgacctgaatatacttgatcctgccgatattgaaagcttcaccatcctgaaagatgcttcctctacagctgtatatggtgtacgcggtgccaacggtgtggtactcgtaacaacaaagcgcggtaaatcgggtaaactgaatattagtgtgaaaagtaatgtcgggctttcctattctgcacgcaatcccgaatatgtggacggatatacgtacgcacaactagccaacgaagcctccgtcgtacgaggtggacgtcccgtatacagtaatgccgagttaaatctgatagaaacaggactggacccggatttatatcccaatgtaaactggcgtgatgttatgctgaaagattatgtatggaacaatcagcatcacattagtatcaatggtggtggaacaaatgcacgttactacatgagtgtgggtcttcaacataaggatgccatctataagcaagataaaggaattaaaaactatgataacagtgtaggttataataaatacaattttcgcgcaaatatcgatgctaacctaaccaaaagtactattattgagctgggcttatcgacagagattgtaaccaattctttccccggatatgccaatgatacgaaagccttgtggcaaacacaagccaacctgacccctgtgaccgttccggtactttattcggatggttcgcttccagcctacggtgccagtgctgaccaacagaacccatatatcttactaaactatacaggttataagaagaaaaatgaaacgacaagtagtatccgcctacgccttgaacaagattttgaccaatggataaaaggtctgaaggcagaagccaccatgtcaatcaataattactcagccttaacacagtctcaaacaaaaactccggcgctctactatgcacaaggaagaaacaaagacggctccttaaatctgatagaaaaagtagccaaaacagatgataaatacgagtctaccaatctgtctacacggaaaatctattttgacgcccgtgttaactataaccgcctgttcaataatgatcatcgcgtaaccggattagccgatttttatatggaagacttcataaccggtgaagcgcaaacacttatcgcatctatcccaaaacggtatacaggtttggctgggcgtgcaacctactcttacaaggatacctatttcctggaaggtaacatcggctataccggttcagaagcatttgagaaaggacagaagttcggcgtatttccagccatctcagcaggttgggtacctacacaatatgaatgggtgcagaagaacttgtcttttatcaatttcttcaagatcagagcttcgtatggtatcgtaggtaacgaccgacttggtaacgacacacgttttccgttcctttctaccatgaccgaaggtagtggagccggtatctggggaagtggcaagaatatagcagaaagccaggaggcgtcccaaaacttacgctgggaaaaagcaaagaagttcgatataggtattgacggacaactatttaatagtagtgtggagtttacagtcgactttttcagtgaacgccgtacgggaattttccagcaacgtgcaagtattcccgatgaaatgggattggctacgctgccttgggcaaacgtaggcgaaatgaaaagttggggagcggatggtaacatctcatacacttaccggttcaaaaatgatatgagcctgacaggacgcgccaacttcacttactctaacaataaactgcttgaatacgaacaaagcggaattaaatatccctaccaagcatggaaaggaacaccttggggaactcaacgcggattagttgccttaggactgttcaaagaccaggcagatattgattcaagccccaaacaaaccttcgtaaccagtgtaatgccgggtgatatcaaatacaaagatatcaatggcgatggtaaaattgacagttacgatgaagtacctatctgctactccaatgttccacgtctgcaatacggtttcggtctggaattccattggaaaagactgactgtaagtgccctgcttgaaggagtaggccaagtgaactttctgtatggaggcagtggttttcaccctttcaacggtggacaaacaggaaacgtactcagcattgtagcggatgccagcaatcgctggacaccggcttcttattccggaaccaaagacacggagaatccgaatgcccgttttccgcgtctcacctacggagaaaacaaaaacaataatcaggcatccacattctggattgcagacggatcttatgtacgcttgaagaatgtacagattatgtatgacatcactctgccatgcttcaagaagatcggcttgcaaggttgccagatcagcttgatcggtgataatcttcactgctgggacaaaatcaaactatgggatccggcacaagcatccgacaacggtgcggtatacccgctgcaacgtgtatttaccatacaggcaaatcttcagttctaaacctaaaaaacgatataattatgaataccaaatatacatttaaagctcttctttgcggcatatccatttgggcagggatgagtctcggattaacctcatgtgagtcttatctggatgtggattcttacttctacgaccagacaaatattgattcaatctttcaaagtaaagttcgcgtcaatgaatacattaacggcattgccaccatactaccggatgaaagtaaactgttcacctcctcttatttcccgttcggcatgggttccgacgaatgcttcgcatcgtgggcggacgattatgggaaaaatgagaaagacccttacagacatgccgcaatggctctgttgctgggagatgaaactccccaaagcgcgaactataataactggggaaacttttataaaggtatccgcaaagccaacatcgtgttgacccgcatcagcgaatgcaaagacttgtcggatatggaacgccgtgactatacaggacgcacttacttcttgcgcggatatttctatttcagtttgctgcgccaatacggaccggtgcctatcgttcccgacaagcctttcgatgccgataccccatccgacgaagcctctatcgaacgaagcacatacgatgagtgcatagactacatctgtagtgatatggaaaaagcagcggagttcctcccggattcccgtacacaacaattccagtacattgcaagcaaaggtgcagcattagcggtaatctctcgcctacgcctttatgcggcaagcccatggtataacggaaatacccgctatgcggactggaaaacagccgatgggcggaatttcatttctcaaaacaacgataactctaaatggggtgtagccgctgtagctgccaaacgaatcattgatatgggaaaatacgcactctatacaactgcccgtacagaaagaacacaggaactcccgtccaatatttcacaggccggtttccctgacggggccggtaatatcgatccttacgcatcttacaagagcctgttcgatggttctgtgaatgcagagttagttccggaatatatttattattgcaatgccatagtgaaagagaactctcctcaatggctggcgactcctaccgctctgggaggtgccaacggtataaacctctgtatggatttgattgattcctataaaatgatagatggatatgacatccaccattccagcgcaaactatccttaccctgacgcgtctcatgcaggcgacccgatagatattgcttacagaatatccgatggctataccgtgaacggcaatgtagccaaagtcgatgcttatcgcgaaccgcgtttctatgcaacgataggatacaaccattgcatctggcccggtacttcttatgtaggcaatgatccggtaacaaatgtagaagtgacttattactcggatggtaatgcaggcccccttcctgaatatccggacaactataaccgtacaggctatacgctccgcaaatacatcaatcaggaagacaacatgaaaggttcctgccgtaccaaaacatttgccgtattccgctacgcagaaatcctgctcaactatgtagaagcattgaatgaattggaaggaagttatacggatgaagccacaggtatcaccgtgacccgtaatacagaagaaataaagaagtatttcaatatgatacgttatcgtgccggtatgccgggcatcaccgatgccgaactgaacagtagagacgatatgcgtgaagccattaagcaggaacgtaaagtggagtttgccctcgaaggacttcgctaccatgatttacgccgttggggcgatgcggacgcagcttataatacaaagattatcggctggaacaccaaagccagagtaaataaccgtaccggattctacacccgtacaatatgggattcagagagaatacagaagcgtgtatttacacagaagatgtacttcttccccatcccacagacaacgttggatcataatgcaaaactggttcagaatccaggctggtaattaactttaatattaagacaattatgaaaaagcatattttattttcattagcaataggttcgctctttgtactcaccggatgtgagaacaccaatgtttgggaagaggaacagtatataaaacaagcctatctggtaggtatcggagaagaaggagcattagtgacccgcaacgtcaactatgcggacgaaagtgcagaaactttcgtatcggtaggcaccagcggctcattgaatccggatggggacattcactgtacattgattgaagatccctcaggcatcacttcttacaatcaaaaatataaatcgagtacggaaatccaatatcaggcacttcctgcggctaattacaacatatcttcaatgaatgcagtgatccgtgccggagaatcttatgcccgcatccctgtcgccatccacccggaaggattacattgtgattccttatacgcccttccgctgaaaatggaatcttgcaaagagtaccctgttgcacaagctgaaacagtggttctgttcgctataaagacctacaacaactactcgggatactacaattacatcggtaccaacaacggagcttcctttagtttgattcgtaatgctgttgctgtaaacaagaatacaattcgtatttattatacaggcactgaggaactggcaagagcgaaagataccggactcaccattacagtgaacgaagataacacactcagccttgccggatggaagaacctgaatgttacagagggaagcggaagctacgatcctcaaaacaaaacattcagttttacatacagggtgaatgggaatgaagtggaagcctatttaatatcggcaacagcaagcgaagaataatcgtaaccggaaaggatatattaaaaaccaccacagattatacagataaaaacagatacttgcttcttcaatataaacaatctgtgagtatcagtgtaatccgtggtgaattattaattacataaatgaactattatcatgagagaaaaaaacatcaaaagagtgttcatgtgttgtctcaccgctttggctgctaatacctatgcccagaatttcaactgggtcagcagtacagaaggcaacacttggaaacaatcaaaagtgaaattacaatcgagcgccggccaaaccccgcttttagatatcagcggaacggaagaaggcaccacattcaaagcatggggaaccaccttcaacgaactgtgctgggatgccttgaacatgctcacccgtgatgaacaggacgacctgttgaagaaaatgttttcccctgaaggagaacttcgtttcaacagaggccgtatttcgatgaatgccaatgactatgcccgtgactggtatagctgcgacgaagtatcaggcgacttccaactgaagtatttcaatatcaaccgtgataaactggctattatcccctttgtccgtgcagcgcaaaagtataatccgggtatgactttctggatgtctccctggtcacctcccagctggatgaaaattaacaatgactatccggttcgcagtgacaggactaataagatgtcgcctctgtctgatgtagtactctatgaggataatacggagacacgcgataacgtcttcccccgacaactcgcagtgaatgactacatgattcaggatccacgctatctgcaaacttatgccaacttcttctgtaagttcattgatgcttataaagaacaaggaattcccatcgatatgatcatgtatcagaatgaagcatacagttataccccgtatcccggttgtgcctggacagctgagggtaccgtacgtttcaacgtagagtatctggcgcccacattaaagaaacatcatccggaagtagctctctaccttggtactttcaataccaaccgctatgactatgttgataaaatactttccgatccacgcatgccgcaaagcgttcagggagttggctttcagtgggaaggaggacagatactgtctaaaatacgtgccaaatacccccagtacaagtatatgcagacagaaagcgaatgcggtgggggcaccttcgactggagagcgggcgaacacaccttccatctgattaaccactacctgggtaatggctgcgaagagtacaccttctggaacaataccctctgcgataacggtgaaagtccctggggttggaaacaaaatgctttgatacatgttgattcaaaaacccgtacggcaactcttacaccggagtattatgcagtaagacattatagccagttcgtaacacccggttcacgcgttatagcctacaagccttcaacagaaggaagaacaccggtcttggtagtggaaactccagaaaagaaaaaggtagtgatagccggaaactttaatgatgaggctaaaaaagtaaccgtgaagttgcgggaccgttacctgaacattgaacttcaaccgcactctttcaatacattcgaagagaaataaatttcttcaataaaataataagcaagtgagcataattcatttatgctttgggagtatctgtcatgctaagcgtagtcgaagtatctcctctcttgaaatgatgaagagaatgagatccttcgataagctcaggatgacagatagtatcagataattaagcacgaatatttaatgataactacaagcattattgatcagccatcatttcttacctgtgagacttttgtttcttatctgtgagacttttgtttcttacctgagaaacttttgtttcttgcctgtgaaacttttgttccataggcaaggcacttttgtttcaataggaagaaacaaaatagaacaaatagaggtgcgacaaagcactattgtttcaaatactctgagggcaataccccaaactcttccttaaagcattgccggaaataaaccacgctgtttatacctaccctgaaagcaacttcggagatattatacctgccttccagaagcaaccgttcagcatgctgcatttttatcttacgaacatattcattggtagacaagcctgtcaaagctttcatcttgcgatacagcgtagacttactcatacacatattatcagccagataacctatgtcaatcttctcggatgacaaccgggcttctatcagctgatttatcttctcgataaactcattatccagtttattcaaagactctgccaataaagcacgtttctcatccatattatgatgtggagtactggtattaaaacgctctgtcagccgcttgcgggattcaagcaaattgttgatacgactatgcaggagagtagcactgaaaggtttcgtcagataagaatcggctcccacctgatatccctcttctttatcctgcaacgaatctttagcagtcaacagaataatgggaatgtgactggtgcgcacatcttctttcaatattttacacatcgtaattccattcatcacaggcatcatgatatcactcacaatgatatcaggaatactatttaatgcctgctccatcccctgttcgccattcgccgctgttttcacttcaaaatcatcagagaaggattcagcaatataattgcagatgtcctgattatcttccactatcaacataatacgctttccaccggaagctgactcaggaatctcttctttttcttccttttcatctacggttctttccggtgaatcggcatgtaatacatgaggataagtattatcagtcaatagactgaaatagaaggtactacctgtacctaaggtactctccacctttatttccccctcatgcaacgtcaccagatttttcaccagtgccaggccgatgccggtacccgaagcctgatgatcgcctccttcctgataataacgattaaagatatggggtaatgcctcaggagtaatgccaaaacctgtatcacttacttttatttcagtataactgatattattccgtaccacattgtgcaatcccagggtgatagaacccttctcggtatatttaatagcattagagatcagattatccaggataatagtcactatctctttatcaaagtatagaggcatatcctctttttccagttcgatgcgaaactcaatatccggcttacgattcagttctttatatttaagtcctatttcgtataccagattggcaatattgtcatgagccacacaaagcttcttattctgtgtttccgtctttctgaattccagtatctggttgatcagattcaataatcgtatggcactttgatggatgactgatatcttctgggcatccttgttggaaagcgaattactcttctgcatatcttccagtgggcccagtatcaatgtcagcggtgtacgaagttcatgcgtgatgttggtataaaaacgcagacgctcctggttcagttcctgctcttgcacatgattctttttttccagatcgtacagaacttccatatcaagcttcttcttgtaagcataaagaatgaagaacaggatggctccactcaacaatacatagctgcatttcgcccaccaggtaagccacaaaggcggaacaatatggatatccaaagttgtaacctcatccgaccattcctggttcttgatacgggtttttaccatgaaatgataatcaccgggaggcacattacggaaggttacgctattggggtctgtcaccgtataccatgcatcttccagtcctttcagcatataggcatactccacctggttgaccaatgcatagttctgtatattaaaagtaatattaaagctattctgcatatacttcagccttactttcgactgaccgtcaatactgaccacttcttcattgtctcccatattacccaaaggagcaaatatcttcatttccgtgataacagccgcaggagactcacgctttgtcagaacaaaatccggattgaagtggcaaagtccattgatggaaccgaaataaatctctccattctgatccttagctacactgccactcataaaatttcccatcggcacattatcccaatggtcatagttatagaaaacatccttatcccgcaacagacaactgattcccttattggtactcacccagatattatgatgcgcatcttccgttatagcacgtatatgtgtattggttaagccttcttcacggcggtaaaccttatattcccaatcggatggcgaggagaaacacaccaaaccttctcctgtcccgatccatacattcttcctgctgtcttcataaattgcattgatggtattggaagggaacaggttctccatattaaagagcttgatatcctgtaactcatcatctcctatccccaggccactcccaaaagaaccgatccacagacgtccctgagagtctttcataacgcaccgcaccagattattctcaaactcataatgtcccacgatcttcttatcagccagactaactttgtagataccacgactggtgccaatccacagaatatgccgattgtcttcatagaacgaacggatatcctcgtgctccaattctttaaggaagttccggtggaatatctttctcttcgaatcgtaataattcactccacccataaataagccgaaccacagattatcttccgagtcgcgcagtgaggccagcacagagtttccactcatatcttcaatctcttcctgataaacggatacccgtttaccttgatcaaagacattgattcctcccccatctgttccaatccacaatttaccttggctatccacacaaacgctgcttgctgttttattattcaggcgactcattgaattctgattgggagaatagtaataaccactaaacaaaggtggctcatagcttaagaaatttatgccaccaccccatacacccgtccagatattcttgaatgaatcctgaaaaatgcacctcgtacttgaattagagagactgtatccgtcatctccttccctgatataatgaaattgagtctgttcgggtagcaggaacaaacgctgcgataaatccattatggctattccgccaaattccatagctatccacaacttattcccgtcaagctgcttaatgtcgtagatatagtgcgaaagattcccgtctgaattaaactggatgaaattctctgattcaggattaaacaatgccagacctttgtttgtccctacccagatattattattcagatccttatatacgcatctcacttcattacccggcaagctgtacggatcacccggatcatgcacgaagttcttcgcccttttatctttaatggaaagaatactaaaaccattatggacatggcctacatataacttaccattccccccatcagcaacagtccagatgttatcactgacaagccccggtatatttgccgtattataatgagaaaagtgaccggtttctttatcgaaatattcaattcctttccaataagttgtcacccacagatttccatcagcagcggcaataacattggttacgtcatccgtaatgatactttcaggcacagcctcattatgccggtagaatgtaaaggtgtcctttacataattataagcattcaaccccgccctctgtgtgccaatccataagatggaatccttcggatcatccagcaggcagttcagttcattccccgtaatgccatagccgttctttgtttcattcttatagtaagtaatgaagcgtgttccatcgaacttattcaagccctcttcagtcgcaaaccataaaaagccctctttgtcctgggctatactaaccacatagttattggataatcccttctcaattcccaattgcctgacagcataaggttgtgccgtcagaagggcaggtaacaacagtaagtaaagtaataatctgcttttcatgacatcaattttctattgcaatccaaaagtataaataaattctttatttcagatacacaaatcgttcattgcaagatttacatcccctcactgcaagatttatgcagttcaagaaacctaagatagcttacatttgcattatctaaaagtgatattttagtaaagaatgtatctaattgtttaactttaaaagtaatatgtatgaagaagcatttattcaatgccgccctactctgggcattcttatcactgactttatggactacaggatgtagcgacgacgatggctatcctgatgtggacggacagagcccgaccctgactttggccacggaacacatcgaatccggtgccggacatagttttacaatcgaagggaaactgaccgataccgacggtattgcttccattcgtctgcaatgtccggacctctatctgaacaagactattgatttgattgaaatctatggcgctcccaagacggagtacgatttgagttattcttacaacatcaaacgtgacgaaatcggtgagcgtttcactgtgaaggttacagtgattgatgtgggaggacgtgaggtttcaaaagatgtgttggtaacgatggatggtgactttgcctcgcctaccttcactatcgctcccgacgctgcggttacagtactaatgaagtctgaaacaaagttcaaattgagttttactgttacagatgaccgtatcttggattatgtgattatcaatattcctggtatagatggttttgataatcgtagagtagaggctgacggaaagtcttcattgagcttcacagaacaaatcattctcccgaatgaagtacaaagctacaacattacgatgacggctgtagatgccaagggaaaggagacgacaataacaagcactattaatgtttccgaaatgcccgacttctccaagatgtatctggctgacgtgaagactgtagaagaattgaatagcgatgtcttcggcgtgccgatgctgattaaccatacgggtgagttccaatatcgggcacgttactataacaaagctgctggtacggaaatcttcttcttaccacagaagacaaactttactcctatttgcttcggtcttgatccggaagataattcgaaactgacagatgatcctgaaacagcaaagcccattgttcttgataaggcgggcgtctattatgaaatagacatcaacgtgcaggatgccacttacagtatgcgaacttattcggtaacagaagcaactactcctataaactatgaatatggcaagaaatgcttcgaccgtaaggagaatggcaatgaagccgattttataaatttctatatcggctggggcggttctcctcaagatgcgggcaatcatttgtttgttcaggatacaactaatcctcacctattctattatcctgaaaacggaacttggacacttgaagccggtgaggaacttaatttcatcatctccaattctcatcccgatggatggtgggaccatgtagagtggcgttgcgacaattctcaagaggtggaaaagtttggctactacagcaagaagggagatgtgaatcccaattgggaaggtacgaatatgcgctgggaagacggaacggttgtaggcgataactggatgaagcctacgattacggttgccgggaactaccgctttgagtttgatgcacacttggggcgcggcaagattgttcctgctaaataaaaaagtaacattagattttaaatatgaaaaagcaaattctattattgtgtcttgcgctgataagcctttgcggttatgcgcagcagataacggtaaagggcgtggtgacttcgggcaccgaccaacaaccgttgattggaactacagttcaagtgaaaggtaccggtacaggaacgattactggtatcgacggtgattatacattatctaatgtaggcaagaatgccgtattaatattctcttccattggttttgactctcaggaaatagcggtagaggggcgcactacgattaatgtggtgttgaaggaatccagtgaattgctggacgaagtggtagtaataggttatggtgccgtaaagaagagcgacttgaccagttccattgctacagtgaaaggtacagaaatcactgaaaccgtgacgggtaacgctatggacgccttgcaaggtaaggtcaatggtgtacaagtcaccagcggtggtggaccaggtgctactccgaaagtgctcatccgtggtgtaaccacgatgaacaacactaacccgctgtatgtagtggatggcatgccggtaggtgataatatcaacttcctgaacagtaacgacattgcttctatggaagtgttgaaagacgcttcggccgcagctatctacggtacgcgtgcatcaaacggtgtcatcttgattagcaccaagaaaggtaaaacaggcaaggcccgcatcagttacactacctctgtgggcttccagactgtagctaaaccgaatattgccggtcctgccgaatacaaggaagtgttcaatacccgttatacgaacgatggcctgggttccatctggaaagataatggtgctacaaccaaccctgacgggaccgactggtgggacacggtggtgaataaaactgctctggtacagaatcattcactcagtgtttctggtggatcagaacagcttgtctacaatttcagtgtaggttactaccgtaacaattcacaattcgatgtaggctactgggataaaatcaatattcgtctgaataccgaatacacattcaataagtatgtgaaattgggcgttgatattgctccgcgcatagaatcctgggatgatactccgaatgtcttttcggcagcaatggctatggaccctactactccggtgttccgtcctcaggatcaatgggaagacaatgagttcaacaactaccaacgttcctataataatcaggaatggaatccggcaggtacggtagcccgtcaaaacgcgcactcccgggaaatgggggctatcttgaatacttacttgcaggtgaatccgatagaaaagctgaccttacgtacccagtttggtgccaatgcgcactatcgtcgttccgacacgttcattcctgaatttagcatggaccctctggaacaacaaacattgagcgaaattacccgtcgtaatcaggaatggtttgactggaactggacgaatacagccacttatatggatacgtttgccgagaaacacaacctgaacgttatggccggttttaccgctgaacgtttcgcatggtacaacacgcaagcccgacgtgacaatgttcccaacaatctggaccagatgcaggaagtaaatgccggacagcagggtacggacgaggccaacggtgagactacttacaatacgctggtctctttcctgggacgcgtcatgtataactatgataatcgttactacatttctgcctctcttcgtgccgatggctcttcccgcttcccgaaaggcaacaagtacgcccttttcccttctgtatctgcttcctggcgtgtcatcagcgaaggattcatgcaggatcaggaaatcttcaatgatttgaaaatacgtggtggctggggacgtgtaggtaaccagaacatcggcaacaatgctaccctaaccctgttgaacgaaactcaatattattttggcaatacgctgacgaacggttattacgtgtctacagtaggcaacaatcagctaaaatgggaaactgtggaagactggaacgtaggtgtagatatgtctttccttaattcacgcttgggcgttacattcgaatatttccaaaagaaatctatggatatgctctatcaaaaacagaatatcctggctttgggttatgataactggaacagccagatttggatgaatattggtagcatgcaagcccgtggctgggaattgggacttacctggcgtgatgaaatcggcaaggacttctcttatgatcttggcctgaatctttctgccgtgcgcaataaggctatcaagttctcaggcgacggtcctatgaatgtgggtggattcaacagtgaccagattatccgtaacgaggacggtggccttatctcccgtttctatggttatgtagccgatggcttgttccagaacatggaagaagtatatgcacataccgatgaacatggaacacagattcagcctaacgcgaagccgggtgacatccgtttcaaggatttggatcacaacggtgtgctcgatgccaacgacaaagcttatatcggtaatccttatcccgacttgatgatgggtctgaatatcggcatgcgttataagagtattgatttttccgccaatttctatggtacgttcggtaatgatatttacaatattaccaaaggcagatattccggtgccggtggacagaacgtctgggcaggcacactggaaaaagcatggcatggtgaaggtaccagcaatgatattccccgcctgtcgagcaacgacttgaacctgaactataatcgtgtatccagtttctacgtggaagacggctcctacatgcgctgcaaactgttgcaaataggttatacacttcctaaaaaatgggtgggcggtgctgatttgcgcctctctttctccgcgcagaatccgtttaccattaccggctactctggtatggatcctgaacgtcctatggttgacggtactactgatagttcaggcagcgccatcaataccggtatcgacaacgtggcttatcctaatccgagaacattcttgttcggcattgactttaaattttaattcttgattatccatgaaacgaatatttacaatagtagttttgattgcttcgctaatgtttacctcttgtgaggacttcttgaccgaagacgtgcgcgggcaattgaacgtggacacttattacaagtccatagaagaatgtgaatccgcagttacgagctgttatcaggctcttacttatggaggatggtggcaaatcaatacagtatggctgctctctgagatgtgcagtgacgatgcctggatgggcaatacgacacagagccagagtgactatatttcattagcccattatcagggaaacggtgccagcaacggtcctatttctaacttctggcaataccgttacaaaggtatcttgcgatgcaacattgccatagatcgtatttcggctcttgaaactccggatactgaatcccgggaccgtctggtagcggaagctcgttttctgcgtgcttactattatttcgaactggtgagaaatttcggaggagtgcctttgatgaccagcttccagatgccggaagaagctgaaggaaccgaacgtgcaacagaagaagctgtctataaatttattgaagatgacttggcggccgctgccgaaattttgccacaacgtaatgaagccgaagtggggcatgccacccgtggcactgctttgggattactgggtaaggtttatctctatcaggagaagtggcaggatgcccgcgaggcgttgaagaccgtgattgacgaaggggaatataaattgctccctgactttggtgatgtatggagcttggcttatgacaacagtgaagagagcctttttgaaattcaatacgaatatcatgcaacattaggtttaggtggttcgcttgccaccatcaccggtgcccgtaacggcccgggcgacggttggagttggtgtcagcctactgccaatctggaacaggcctatatagatgccggtgatacggaacggctgaagtggactatcattaaatccggctgtacggagattgccggtgaagaccaattcacggagtttgtagagacaagtaaagccttgaacaaatatcaggaatacgttgataagtatggttgggatcctgattgttatatcgttgatcctgcacagcacaaatctgctcgtctcatccgcaagtatttcctgccgttgaaagatcgcccggaaatctacaatacggacaagagtcctttgaaccatcgtattttgcggtatgccgatgttcttttgatgtatgctgaggcttgcaatgaattgaatgatgacgaatctgcacgtgatgccctcaatcaagtgcgcaaacgtgcaaaactggctgatgttactgctagcggaacagaattgcaaaaggccattcgcctggagcggcgtcttgaattggcttttgaacaaaatcgtctgtatgacatccgccgttggactgacagcaacggaaagaaagttatttgtaacttgatgggccctaacggaacattcgtaaaatggaataccgatgaagcgactcgtgatgctcttgaatgggataatcaaggagaagctagtaacaaggggatctctttcagtgaaaaccgcgacatggtattccccattcctttgtatgaaatcacaatgtctaatggttctatcgttcagaatccgggttggaattaaccccggtgaatgtctaaatagaattcttcaataggtctttatactctgtcgcggatagtttcataatagattatccgcgacagtcttttttaaaccatcgaatatttatgaaactaaaatattatttcactctgctgtccctgctttcctttatggcttgcagtgacgattctccttctacacccgatactcccgatcaaccggatgtaccgaatagtgtagagaaactagtcaccattaatgccggaaaaacctatcagactatcacaggattcggtgcatcagactgctggaatccttcctatgtaggtaaatactggaccaacagccgtgacaaaatcaccgaattgctcttctcttccgaaatccaggcaggaagccccaaaggtatcggtctctccatgtggcgtgtaaacctgggcggtggaactgccgaacaaggtgatgcaagcggcattaccgataaatcccgtcgcgcagagtcatacctgacaaacgacttgacccttgactggaatcgttgcgaagggcaacgttatttcctgaaccgtgctaaagagttcggttgcgaaagtatcgtccttttcagcaatacaccacccgtacaatatacacagaacggcaaaggtttctccaaccaaggaggagtatcaaacctgaaaaacgattgctacgatgactttgccgcttacatgggcgatgtagctcaatactacatagataaaggttatcctgtgacgcacatctcaccggtcaacgaaccgcaatacaactgggatggaggacaagaaggaagcggctggaccaatgacgaagttgccagattggcccgcgaactggatgatgccttaaccgaacgtaatttgtctaccgatatcctactcggtgaatcgggcgactgggaatacttatataagaccaaagacgatgccaatcgcagtaacgttatgtctgcctttttcacccccggctcgtcagcttatgtaggtaacttaaatcatgtaaagaaactaatctgcggtcatagctattggaccgatggtacttgggacggtatgcgcagcgtacgtaagcaagtggcacaagcagcaacgcaatatggtgtagatgtatggcaaagtgaatggagcatgctgggagacaactacagcaacacagaatttgtaggatatgacaatgctacagaaatggatatcgcattttatatgtcgagagtgatacacaatgaccttaccgtagcaggagtatcttcatggagctactggacttccatggacgtagcccgttggggacataaaaaccgttttcttctgatatccctcgtacctggtggaggaatcaacgacaacaatgacaacatagaaaaagaaggtaccttccaacccactgccaccctttgggtattgggtaattatagtctgttcatccgccccggataccaacgtatcaacatgcaactgaccgaatcgctcaacttctttggatctgcatggctatccccgcaaggagataaaatagtagccgtcttcaccaatatgtccagcaagaatgtccgcctaagcgaaactcatgaaggatggagcaacgaagctacgtcaatccggacctacaccactaccaatagcaaaaaactgacagaagccaccgtatctgccggagaatctgtacttttggaagcggaaagtgtaaccacagtagtgtataatctaaaataatcatccaaaatgaaaaacgctatattcacgctgactgtattcatgacagccctgctcaccggccttccggcacaggcgcaggtttcatttggtaatgccaccaaattcaatgaagattggctcttccggctgaccgatgactcaaccattgtaaatcccgccttcaatgacagcgaatggcgcaaactcagattgccgcatgattggtctattgaaggacaactttcaccttctttagcaagctgtaccggctatttacctggcggaatcggctggtatcgcaaacatttcaagatcacggatgacgctccacgccattatatctatttcgaaggagtatacaatcgcagtgaagtctatttaaacggacatctgcttggcaaacgccctaacggttatatctcatttctctacgacatgactccttatctgaaagagggggacaacgtgttaagtgtacgtgtggaccatagccgctatgctgattcccgttggtatacaggatcgggcatatatcgtgacgtatggctaattgccgctcctgaaatacgcctggcacaatggggcacaggttggcatgccacttctctgaccaaccgacaggctaccatagccgtcgatatggaagtacagaaacacatagcaaccaacgacagacttgaactttcagctacactatacgatgctgccggcaaacaagtagcgcaacgccgcactcgtgtttctgacggtaaagaaggtattactaaagaaaatctcacactgaaaataactaaccctcaccgttggaatctggacgatccttacctttatacactaaaaacggaattgctcagcaatggacaacgtatcgatggatgtgagactaaagtaggactccgtacactgaagtttgaccctaataaaggatttgcgctcaatgacaactggatgaaggtcaagggtgtatgcctgcatcatgatgccggtgtactcggtgctgtagtacctccggaagtatgggagcgccgtttaaacaatctgaaagaaataggtgtaaatgctatccgcatgagccacaatccacaggctcccgttgtatatgatctatgcgaccgactgggacttctcatcatggatgaagcatccgatgaatgggaattcccgaaacgtaaatgggtgaaaggctggaataagggggaacccgcctatgacggttctttcgatttcttcgaagaatggattgaacaggatgtaaccgatatggtacgtcgcgaccgcaatcatccttccattttcatgtggagtattggtaatgaagtagattatccgaatgatccttactcgcatcctattcttgacggatcaaccatcaatcaacccatgtttggcggttacaaaccggatgctcctgatgccatgcgtatcggaaagatagccaaacgactggctgcatgcgtccgtgctgtcgatacgtcacgccccgtaacgggagcactggcaggagttgttatgtccaatcaaacagaatatcccgaagccatcgatgtagtaggatacaactatactgaaaaccgctatgatgaagatcatgccacctatcccaaccgtgtcatttatggtagcgaaaacggttccggtcttgaagcctggtatgccgtaaaggataaagaattcatcttcggacaattcatctggacgggtaccgactaccttggtgaatcgggtgcatggccctcacgcggactatataccggattgctcgactttggtagtttccccaaaccccgcggtcacttccgtgcttccttatggtgcgaaaaaccggttacttatgtgggtacttatcccataccggatcgtttcaaaaactcccggcgtaccttcctgtcacccgatgcatgggatatatggaactatgatcccggtcaggaaatacgtgtagtctgctataccaatgctccacaagcacgtctgttacttgatggaaaagtgctaggtgagatgaaaccctatgatgaaaagacaggtatcatctactgggatattccctatcgggcgggtgaattgaaagccgaaggttgcgataaagacggaaatatattgtccagctattccatcaaaacctccggtcgcccctacgctctccgtgtaagtgccgatcgtaccaatctatcttgcaaccgcgctacagcgcatctcattgtagaagtgatagatgaaaagggtgtcgtagtgaaattaggcgataatgacattacttgtaccatcgaaggtccggcacatttactggggctcgaaggttccgataacagcgacatgagtgactacaccgataatcgccatcgtgccttccacggacgtctacttacctacatacagaccacgggtgagaaaggtcagattcgcgtaaagtttacttcaccacttttacaaggaacagagattgtcttgaatgctaaataaccctctaaaaacaaatatttatatgaaatacaaagtattattactcgccctcgccgcaataactacttcgtgttcaccacaagcagatataaactatcagattattcccgaacagcctcagcaaaccatggatcatttcagtgcttcggatgcctggagcatgcacatcataggcaaatggcctcaggagaaacaggatcaagtagctgactggttgttcagtaatgacaatgacgctaacggaaaacccaaaggaatcgggctttctctgtggcgcttcaatgtaggtgcaggaagcacggaacagggcgaagccagtcagataggctccccttggatgcgtaccgaatgtttcctgcaaccggacggaagttatgattgggacaaacaacagggacagcgtaatttcctccgattagcaaaggaacgtggagtcaataaattccttgctttcctaaactctccacccgtttatttcactcaaaacggacttgccaccaacaccggacgtgacggcacactgaatctgaaagcggaacattatgaagacttcgcccgttttctggcaaatgtgataaaaggagttgaaaagaaagacggcattaagttcgattacctctcccctttcaacgaaccggacggacactggaattggataggtcccaaacaagaaggtaccccggcaacaaagaaagaaattgcccgtgccgtacgcctcatcagcaaagagtttgtgaaagagggtattgatacggaaatcaccatctgcgaagcgtcagactatcgttgtatgttctccacacacatgacaaaccatgaacgtggatacgaaatacaatctttcttctgccccgacagtgtagatacttatctgggaaataccccgaatgtcccccatctcattgcagggcacagctattggacaaatacacctttagaaagtctgagagattaccgtcgtcagttacgtgatacattggacaaatacaaagttgacttctggcaaacggaaacctgcattatggggaacgatgaagaaattggcggaggcggtggatttgatcatacaatgaaaacagccctctatgtggcccgtatcattcatcacgacattgtttatgcaggagcacgtagctggcagtggtggcgtgccataggaggtgactacaaagacggattgctacgcgaatacactgatcccgatcttcatgatggtaaagtggaagactccaaattattatggatattaggtaattacagccgctttatacgcccgggagctgtacgcatgtctattaaggcaacagacaaatccggacaggtaatcccggaaggagatactgatccccaaggactcatgtgttctgcttatcagaatacaaacggacaatgggtaatggtagttatcaactacgctgatcaggagaaaaatttcactttcaaagtggatggttccaaagtaaagtcatggcaaggctaccgcacctcagatgaagcaggtgaagatcttctacccattaagaaactgaaaaacgaacagatagcagtaattcctgcacgttccgttatcacttttgtttctcaggattaagagatttcaccacagagtaacacagaggtttacagagttttattttcttgatttagaaattattgaactctgtgaacctctgtgttactctgtggtgaaatccctattctttcggccgcccaaatccctcgcagacattcaaacgatgaatatctaccactgcacttatttctcccatcttccctaacaatgtttccgcaccattctgaatcttgaaattgacttcttcttcgtacaatggaatcatctgatagaaattcacttcttccccattaggcaattggcaaacagcagctccttcttccacattctccggattgatcaataatacactggaaagctgagtattctctgcaaacggtttcccgttaggtacagaatgtccccaacctaaccaggagtcctcttccaatggcagacgggcaagtatcttcagccaacgtagcggccagtaattcttttcttcatggtcagaaatattccagtcggcaggtaaatataccactatctccgcacgctccagcttatactcagccagttccttaggtacattcatccgatgggcacccatgcccgatgtgaccagcgtgtaataattcctttcagccgtcggctcgacaataaagatatccacatggatatccggtgaggcgatctcatggaacacatgatccgaatgaccaaagaacttgtcaatatgcgcttcaagagcatccaattcctcctcttcgtacatctcaggattatgaggcaaaacaccattcttacaattttcaatgtattcctttgcatcttcatcgctgggatccaattccaatgaacgttcaaaggctttctgcgccttatccagttggttcagataataataagcataacccagtcgatagaaccaaagcgcatcttccttacattcttcctttactgaaagaagctgttcaatggcttcattataattcccctgattattgtatgagcgcgccagaagccccgtcaattccgcagttctctcctcttcaggaactttcagaatagcgtcaattatcttctgttcttcatcgtccgcgttccattgttctatttgctgaagcaacttatcatgcttgttcgttttggtagcaatcagatgatcaataaagtcagctgaaaagcccattgcttcatcctttccctcgcacgaaagagtaaacagggtgaactgatgttcagtgataatctggcactggcacacatattcatcactgtcttcttctccacccagatcataaagcctgcacttaccgttttcaaaaaacttctcttcaatcagcacattctcatcgtcttccagataatccgcttcgtcatcgggcatagaatacgccaacatccgcactacatgccaattctcgtcttctccatcataatacccgcgagaatcatcctcttcaaaataaaggtaattacccggaagatcaaacttcagatttcctaatgtataggtcactttgtccttgcgataaccaatcggaaattcacttatgaaatccggcaatgcagaaacatctaccggctctttttccaccaaacgacaaagcaacagatagtcttctttcgggaaagcaagagacgtatccattgcggcagccttctccaagttttctataataaacgaattgatttccatatcttcttcgctacgcgcggaaggcataaaatagcaatcttcccacaaggcactcaaagccgtattccgatagaataatgcatcacgctcttcattattccacatgaaaaattcgcttgccaacctctcgataccttcatcttttatccgttcgactaagtgctccggacatattcttccgaaagaagataccaccgttccttctatcccacggggcatgtacttattgcaatcccaacaaatggcagacatgctgcaattctccttcagacgttcacaacagagttctacgatggcgttcaaccaacgatagaaatgttcagaacgcatccgctcaaagtccctgtgctcataatattccgtatcgtcctccacctcagtagagaagtctctcagttctaccaactcgtcaacgatatctatcgcagccttatgaaaacctgctcccaacaggttagtctgacaatcacctatgacagctatatcatcttcttcctgttcataattgaagaatatatttcctaaacggcagactgataattcagaataatcttctgtatgactgacagatgcctcgtgccgggcagcaactacatccaacaatttctggaatgaagaaatacttttgcatttcgttgttaatctgaaacctatactcatggttgtgatatatttataattatagattcattttattcctcagactcgtcatcctccgtttcatacagtctgcacaagtcactaccctgacggaagtcggaaagatagaagtgatattggggatagtctttcagaaatggaacaatcttttccataaatgccgactcatcaaacaaaagaagatcaatatagcaggtaccggtaccgatagctccccctaataaaagtcccaaaccttccggttcaagcaattccgccgccaggcggtcttccagttcataacggaaatccagcactttcttcccatcaccttcttccttattttcataggggaaagcgataaatacagcctgcgcaccaaatccattcaaacggtcgaacagttctgtggaaccattataataattggccaccaaaggctggaagcaggagctgcctgccatgacgtcaaaacgtaattcctcgttctcctgaggctcaaaacgatagctggtatagacttgctgcggattatcaaatatctccttaccatgagcctttaatgtatctgtaatgtaggctctgagttcaggaagctttatcatattctccaatggagcatctgcacgctccacactggcaatatactggtaagaaagtccctcacccagcataatctccatcatgatataataagcattatagctttgtgcttcttccagagagcataactgttcttcatagaaatggatattgaaagcattgatatcttcctgataagcagcagatacctgcacctgagccatatctacattcgccccatacatgccgaaagagaaacttgcatccgtcccctgattgaaaggaaaaaagtgccatttatccttgaattgtgcaggcatttgcgacacaatgtagggatagagatagaacaaatgtgtattgccctctacggagaatgtgaattcatagtctccacccaggttaaaatgtacatcctcatctatcaaattcgtaccggcggtaacaaactcaacagcatcaccaccgtcaagctgcccgcggttctcaacaatccgggagagctcctcctcgttatcggtaaaccacttccaaaagtccttcacccgcttccggaaaggcaaagctttttcatattcacccaggttgttatatgcacgtgccagcaaacctgtagcttcagaatctctttcttcaggcgaaatctgtcctaacatatcaacaattctaccatgctcgtcagtttctgtccaagcatcaatttgtttccttaatgtttcatccattgttcattgtggtttaatgatgtccaaagatataaaaactcagtttattcactctataaactgccataaaaaattacaattggataatggctattttatagaagccatgacaaattgcaaattccattctgtcaatttgcttttccaaagaacttttatttagtatttattcaggaagatacccaaaaggtaggataaatgtcattatattcacaagagaaagagcaagaagtacaaatcttttctttatattttgaagactgtttttcaagaagaacagattataaaagctgcattgctatcgttcagttcataaacagtcttttcaatattgctgtatatacttatccaaacaatccgcagccgataaagtcaatttcccttttatacgttgctttgccttcaacactgaacagggagtaatattaaaaagaactgcaatagccttatttcctaaccgtgcacgaatcagatagcatacctttaactcttgcatactcagcccgtatgaagataactgctctgacaggcaaccgccataaaacatatcaatgacagtgaacagattcgtccattcagtttcctcccggattatgccataggaggggttctgatgaaggcgaagcaactgtcccagagacacaagtaaggaagaagaacattcagccagtaccgaagcattctggtactctttcagttgtttagtcagttgcttattgcggaataacaaacaagcattccagttatcatgataagtttccatattctatttctcattcttttaatgttccacataatccgtattccaatttttcgctatctcctccacttcttgacgcatctcctcaatggccgtggaatgaaccttgggcgtccggttcagcacattccatttcatatcctcaaatttgtctttatcccgataattcggttcagaatagagtttagccagtagatagtaaggatagattctgcccggcaggcgactgacagaaataagaaaaaaagcctcggcacatttatattcatgcaacgcctggcaatttttacccataatattcaatatcatcggatcattactatacaaccgtgcccgatccaaacactcaaaagattcgtcataacgaccggatttgtgcaagctatgtccatattcaaacaagaatgttcctttattcctcaaagacggataaagcttttcataagccctgttggcagcttcgtaagcccccgagcgatagagtattctcgcattcatccagtcccggcaagcgtctttttcttgcgtccatttttccgtatagcctccgagccacaccaccagacaaacacacagaataagatacttaccaattacatcacctatcccacaggcaagaagcaaacatataccagcgacaatgaaagccggaagatgcagcggataggaagaaaaagaaaatacaagcaaggagataagggcaccacagacaccatagcgacggagtctcactccgatccaaagacaaccaaagattacaaacagcgccaatatacacatagcaataccatacgtcagggcaaactccagatactcattaaatgcatattcaggacttcctgccacacgttcttcccaagcagcatagttccctgaggcaaaatataaactctgagccccaccataagcacaagcgaatccggtatgacatccccacggatgagcagcgatggcccggcaagtcatcttccacataaacagacgccccaatgctgaatcgggttttaaaaagaacattcccgcagcagccaacaacagaattaaaaatatcccggttccccacaatatataacgctttttatagcgacgccacaatatattccacttccgtttgtcacgatgcatatatgccacccagatacagcttattgccgcagctatccaggcggagcggctcatagtggaaggcaatacgcaaagaataagcatacccgccacagcagctgtaattttttctatctttagtgacttacataaatatctccacttttccggcaccctcaaataatgatataagcatatcggtaatatcattgccaaatatccggcataaggaccaggattgaaaaaagagccagtcaacgcataatgagaatgtcccgaagccgtaaaaccatacagttgcctcattccccatacagtttctaccataccaaaaaacattaaactccaagaaaagtaaataaaaaaataaggaaaacccaatgcctttctcaaaggtaccccttcatatagctgcatcaaacaaactgcaataatagaaccagccgtgaagggtaaaacctttccaaaccacacccattgaataatagtttccccacttgaaagttcaggcgtaaccacatgcgccatgcttaatagtaagcatagagtagtaaataacaaaccgtgttttacgtactgcattattatgaataccaataattaaacaaatatcacttagtataatatttcaaaagaatggaatgtaagtattcatatgtaaattttacattttccttctgtggaacaaaaacattatttattctctcatctacaaaagaataaacaaacagatacggcatacctatatctactaatacagaatccaatgcattgctaatgccataaatatcaaaatgaatgttattgaccctcttaaacttttttacataattcatattcttagtactagtaaatagtacaatattctgtaaaccaatagagtcttgataaatattcaatttactgactatgctatctatacaaacatcacaatgcatttctgaatatcgcaaaaccaatgtattatcagacattatatctgaaagtgtctctctacctccctgcaaatttgtaatctcccaatcacgcgatatttcatttccattcaatagtatttcattagctctacattctttcaatgcttctaattgtccaatcttaatatccgaatcttttttcaattcatataagaacgattgaacttcacttatctccttatattggatatagctatagatattgctcaataataaaaagagaacaagtataatagccaaatttagttctttccttttcattttgccattcctctaaatttacacttaaataatattggattagaatcatcacctatttctccaacaattgaatctattttctcacgataatagctattcgtacaataagttctcaaagatttccaattaaaagagaaagtatccgcatcttgtaagatataaagttcaccatttgttgttgtataaaaatagtgaaatatcatattcccaaacaaacctatactaagccatttcccaacacgaatattagtactgagtttgtcatatataaaatatttgaaagaatcatccgaatagtagcctaataaataatcctttgaattttgtaaatattcaaaccctttcaaatatctatttttgcgaacgaatctaaaaagcatgtctttatcaacatttacatcttcaggaagacttctagaggtgtaatttataacataaaaggggcacactgtgtcctctttcaagatataaatcgtatcatttagagggtaaattagtgtagcttcattattgtatttgctagcgtatttccttaatccatatccagatttatcaatctgttttctgttaaatggaatttcagaagatatgacactagaggtagctaagtcaaatttaaaaagattaaaatccccataatccgatccctcataattagaaattaaataggcaatattatcgaatgatataatgtctttatgataaacatcataagaaatctctctatgcgaattgctgtataaatcatacgcaatatatttattacgatatagatcctgaattaatatggaatcacctttaaaagtaaaattccccaaacgagagtattcaccaggtcccatgccttgtctgccaaggctattaagaaagtgtcctgttgtagtaaacacgaatatttttgcatttcctttatcagacacgaatattttgtctttataaagctctatttgtttaatatctgatattaggcattgttccgttgtctctaaaggtataatttctattgagtcttgtagtatttcggataaatctaaatattcctcaaccacttccggatctataagaatctcatttaaaccttcattaggtacatacttatcagatgaagaaaaacatcccccaaaaagcaaacacaaaaaaagcaaaataatatttttcatttcaataaatgttttatgattaagtttttagggactatctttcaatcagatagtccctaaaaattagaacggccaacgtctagtgcaaggatatggagaacaacttcctgttttaccctcacactctcccaattccccttcacgaataatctcagcaaaaatcggattattatcagaatcataagctactataaccttctcaggtataccacatccaaatttatgaagaggtcccaatgcaccgcccgaaatttcatcattatttgcaaaagcttcagattttaaagataccaaatctacaatttcatcactattgcgtattgtaaagactgtattaacaatagcaatagatacgacaactaaaacataaataatttttctcataaatactttttttaaaatttaaataaatacttatatcccactttcgaagagatattttcgtagaataggcagatatatccactcactctatattaaaaatactactttacatattatcctcctccattctttaatttttattatttatacttttaaacgtcctatcccaccgaatttcatccgttcccctatccaccgacttccatatcctgacagccttacccacaataaaaggttccggaagcaagccccaataacgggaatcctgggaattcatcaccttatcgcctgcaacaaaataatagttctctttaaaacggtaagcatgaatcgcgctatcattcagtaaaaccgtatcaccatacaggaaaagtttctttctttgttcccattctatcacattccgatataggacagcatgtttagggttcatctctatctcatctccttttgcaggaagatagaggggaccgaagttcacgatattccagtccaccaatccattataaggatacccactcatcactattccataatctttttctctgccatttgctactatacgcatcagtgcatcctgtgactccacatttcccaacgacgtttcacaactacgcacccagtagtgagccttcctgatctcaaacgtatcccccggcaaagccacacatcgttttacatagtaagacatcacgttcaggcctatactgtcccattgtgcaggatagggaaaattaaaaaccaacacatcattccgccgtatctttcccaatcccggcaaacgggaaatcttgacttctttcccttcaagagcatcccaaatattaaaaatgcgtccacccatcacccatttattcaccaagatattatctccggcaagcagggcaggttccattgagtcggaaggaatcttgaaagtagcgatactagtcacctgaagcagtatccatatcaccactactccacaagctatcaggaacaggttgaggaacttgtcaacaacccaagacacccctttctttttcttaccagaactgttgttttccatctttatattcaaatatacgttcatcctttccacgggtatgatctttcaaatagagcaatgcaccttcaggaaccttataaagcaaagaatcggaatgaggacggaccctacctgccgatgcccattccccatcattataatagaaaagttcatactcatcgtccgtacgaataaaattatcacggttgcggggagtgaacacaatcttctcaatacgtcgaggagtacccaaatcaagtcccgaccaaccacccgtaggctggacatagtcaaaggaagtataagggtcgccgtcaaacacgtttgtgtactcatgtgaaccgtccaatccgttacaccccggtgtaccgataatcttccctttcaaagggacactgtcagcaaaagatgtatagaaagcaacctccgaaatattacaatagctgtctttagggccataatagcgaacataacggtaagatcgggcactatttacccgtgcaacattccaaagccgctcggggaattccttgatgataaacagtgtatctttcctgttgaaatgagggtcattgctaccttcaaacacaccatctaccattcgccggacaaaaggttcaaagtaaagttcatatttatggagcagcgtaacttcgacctccctaccgcccgaagggaaaaaccgtacttcaccgctctccctatcaagcaagaaaggatcgctttgcgggcatatactgccgttttcataagttcccaaacggaagacaacctgcccctccacattctcaaagacagcgcccagacgcttgtcgtaaagacaccacccgatgggagtccagtccataaagctggcggaacagagatagaccggttcacccttctttaaaggattgtagagattttcaggaccaaccgttaatgtgcgattcttgctccccgcatatatagcagtaacatcacgaaaacagggataacggaaagagggatgtctttcttccgctttctttcccatagccctgatcatttcccggttaacactgaacgtacgacgataaacctttcctttagggtcccaataattatcagggctattcagttcagaagtagggtccagaatggagcaacgataagagttaccatctttgtcaaagacagcattccaataatggggaacatttttatttccccgcatcaacatgatttcctcgctgcaaggcagccccaaagccctgaagacatacagttgcaaatcagtgaaatttacacaacttcccgagcgccagtccactactttgggaccgtaatgagggccgaatgaaaatagttcggtaaaatagaccggagctttatgtaaggtatccatcagtatttgagaaacatacttcggatcttcagcttccggaagtcctcgaatactgtccagcaatgggttatatttattatagattctttcacgccagggttccagcctttcatcacccacacggtaaggaaggataaactcacagaaatcgtcaaaagagacgtttttcccccaaggctgttcacgccatactttgaaagcccattcgatattctcaatcaaatagaccggatcaatatagatatcgctcttcgcttctaatttgtccatatgaaaagggccacaagcacgtttaatggaatccaacactttatccggatacatggtgcctttgccgtgaagttcaaaaagcttcaggtagtcatccaaaggttcaccttcatagctatagtgaaaaggcagattttcaatgagaaagacggcagatttatattttagggaatcatccttatatttatcaaggacaacctgcaatttagagttcgcggataatatatctttcaatgaaggaccaactggaactttggtacaggagagcaatatctgaaaaatacagatgattaataggataccatactttctcataacaaacatttatatcattatgaaactcatatataaaaatcagttcttaaattcataatagataataacaggatttgaatcttccgatatgccctgaaaagaatcaattcccttcacttttctattaattctgttatcttgaatatccttcaaaaaaacatttcgtgaaaaatcattattcatttcaacagaatatgctcgtttttcatcaaaagaaataaaattagggaataattgcactccttcatcgtcaacataaagtaaatcattcactacattttgggtcatatacgctgacttttgcaatttatcataaaaggtaatgtaaagattatctcttatgtaataattaaaataaacatatctatctgactccaaataattacatatattatatattttagttgtattattcagattagaaaatatctttgaagctttttttgtttccttctgagaatcaagataatctttagtaacaaaatttttactttggagaacaatgtatggctgtatgtcatctttagttatggcaaatattgtatccataaataactgactaaacctaggcttaccttcatattgagaaataaaaggttgttggtttgcaatgaacaattcattccagcctttattatattgcacagcgtccaaccaaaaagaagtcctcttcccgtctttcatatttacttcactcaacagaaatttgctatctgcaccttcatatgtatacaaatctgtatatatcttaccgttataatactgaatacgactactaaacattttttcatttttcaatttgaaagaactttcataatcaccattcgcactatatttcaatatcgtttgagtttgagaatctaacaaatacaattttttgttttctatatcaacacttatgtcaagtggagaaatatattcacctaatccaactcctttatctccaatttttcttaaaaatttccctttttcatcaaagaggtaaagtccttttcctctctccaatacatagagtgaatcacctataaattcgattttatctatcttagctaataaagagttatctgtcatttctaaaacgataactcccgccgcttcgaataaagatgaaaatgacacactctctttcttctgtacattatctaaatcgattgtacaaactccattatcatttatacgccttacttcattacaagaaaaaagcacaaaactaaacaataacatatatattctcataactctatttcttattcgttaataaagagaattgtatggtttatacaattcccttttaatatttgtataagtaatgtcacgtttctgacgtaggcaaaataaccaataataacattcaaaccagaaatcttataaaaagtccaaaatgcttattactaaaactccacctaaaacaaaattattagtagcaatatatagacgtgatagatccacttgattgacctgcaaatgggccactgtaataaacacattcctgaccttcctcacaacttccaccactaccaaaattacaagaacaagtcctacattctgatactttcacaagagtattgccttgccttatactagttacttctgttatatctgtagtagagcattttacttcacttccacctcccccttcaataaaagccaaggcatctatattagccaagagtagattatccgataaattattatttaccataaatatattaccattacacaccaacaatattatcaataatgttgacacacttaaataaaatttaattttcatacaatatttgtttaaaaaatcttttaatagaatattaatcactcaaagtaaaaatcacataatctcctacagtacaaatcatttcataaaacacctcctttcatttaatattataaaacttccaattgcatggcgctttctactaacagtcttccttcacaactcctttaacagacaattgaatcataccgccttctgtgttacagaatatattgattgtttttctaaaatatcctagaacctcgggcgttacttttattttgatatattttttttcccctttgggtacgggatgactatcccattcaggaatagtacagccacaagaagttgttatatcataaataagcaatggggcattacccatattaattatggtaatttctattattgattctttcttcaattttaaatcattcacctccactatttcaggttctattttagctatagttctaacagcctgaacgttttccttttttttctctcccttaactataaattttctatataaatcccatatttggggattaagagcaggattacctactaaaacgatttcattttctttatttagcaaaaaacattgatagtttaaatctctagaaaaatgatagatagaatccaatttactctctttatcaataaatactgaattgttaaaattatcacgtttcaatatattcaacaattctttttcacttttcgattgaaaacagaaaataaagtttatactatcaggcatcaatatacttgcattttttatcagcgtattccatttatacaactgtagcttacaactagtacatcctatagaatctatataaacaaaaattttataaggggcattaatatatttacatgtatcttgtactctactaatttcctgtatacttgaaggcaaaattatttctcttccaatccattctttcacaattttctctgtatcagaaaacctctgattcctacaactacctataatagttaccaagattaacataatcaatattctttttaaatacttcatactacttcctctgtctgttattatctcaaaaagttaaacaccatcatcggctcaccatgcggaccaatacgaactgtatgaatactatctttcaaattatagatttcaagcacttcccccaattgggtaacagcagccaagactccattatgaggattagaatcgatgagactgcgccatacttgcctaatacggaagtacatgcaacaagggagagcagggacaatattcaataacgctattcaaagctgtaaccaatcatgacaaactttgtctttccgcctaaagggcaatccaccgttcctgtacctatacattgtattggcacataattctcgccggcagctaaagcctctatattcattaagagtaagtcattttgtgtcttttccggcttagccatataggaaaccagaataattaacacaaacagcacaccaagcatccaagattttcttttcatacaatattaaatttagtattagatatttaaattagacctgtctcggaagcgaaggtagcaatcaaggaaatccgctccaacaaatctgactgacaaacactgaccaagcttcatttgtcagaatttgtcagccgcatactatccatgtttttaggcattagtcaaagcatttttcccgatgaaatgggggattatcagatgataggaatcatttttgaactttatttgaagagctgttaactcactgagtgattttcgtaaacgacgaataagcgtatgtattctttcctggtttccgctaccattcggccataaagtctcactaattagtgacgtagaaagcgtgtgtccttctgcttgaagaaacttttccaataagacagccgtttggggagtaagctttactacttgctcgttaaagactcaactcattctaatttatttttctctttgaaaaaaaataaaatagggttatcatcttccttaatattcaaagcatttgccttatttctccactcagtgggcaaaccagacataagctctggatgattaatccacctatcggcagtaagcaaaaacataacactattatcatccccctcgtgtggataataatcgccagaattaatgtaaaaaatgtcatccataagaaattcgtctacataaagtttattttcttttttatcaaaaagaaaaagtcccgtctgattcgaatgaaaaattagaaagttctccgtttccctaagtgaatttaaactataaacgattttgcccattgacacctcattaaaaaaagtttgtggatcagagattgatttctttatcagatcatcactcaattttgccattgaaatatctaattgataatgagcggcaggagtatcatcttcaaagcaataaagcttatagtcaagaggagcattaaaccatacccgcttactattcaccatttgaagtcctctacttctaattggaaaatctattttaatatcatctccaactgttctccacgttttattcttcaaattataaattttcaacatatatggatagcaagaatatccattcaatttattataaaacaagacttctccccgacgacatgtgacattttcatacatttcaccaacttttacctccgaaagaaagtcaccttttaaatcaaagaccaacaatttataaaaatcattataaagtagaatctgacctaattcttcattaaaagcaatgtcaattatacgttttgactctcctggtccgtttccacatttatcaatacaaacctttaatttaccagaatgggcatctatcaaaaaaacactccgattccccgacagcaaaagtatgttatcatctgatcttacaattttttttatatcagaaacaagaaacgaatctgtagtttcaatagcgataaaactttcgaaatcaaaatgctctttaaaataagtctttatagggcttacgggcacatcaagcattattgacactttatcagatactttcctatccgtagaacacgaagacaacattaatatagataatagcacaatattttttagcataatattcagtctaattttacaaaattcaaatatcataagaataacattaaaaccactgcatcacatttgcagcaaattttacataccgaaaaattaaaaccaataaataaatcacgacctccttgagaatcaaatataaaaaacaagtattcttaatctgattctcaagaaggtaagtttaaggtggtaatgtattagatttcacaaaatacatactttatgttcaacctaaattagacttcataacattttcccattggagaaaaggactcatatgttcctgattggcatggcaatgtcccttcaccaaaacaatcaatactatacttatatacactataaagtataccattttcgcattttgtcccttttcccaaatcatgcgtaagtatagtcccaacacccttagagtcatcctccctaaaagccaatgcttctacattagctaatactatatttgataaagagttaacagtcttagacagataaactccatgagctgcaactgcaacaaacattataactaaagatattattattaattttttcattattcaattttttcatttacaacttaaaacagaatctctattaactaatgtgaatcatgatctaaaataaaagcaccaatcatctatcattcttcgtatgtatcatttcaacgaataagcaaacgcattgcccatttaaaccaaatatattactcgaatagacctcctttcataaacagatatctcaaaatattttataagaatactacacaaatacgcattatagcacagacacattacaaagtctatcaaacaacagaactgctaaacctcgtacatactaatttctgcaccaaatccgccaataaaagcgctttttgccaaaatacaactgtattcataggcaaaatacatgcggtcagatttctcgtttccgggaaatccatatatgctgttccctcatgcatagctacagaagtacatgcaacaagagagagctgggagaatatttaataacgctattcaaggctgtaaccaatcatgacaaactttgtctttccgcctaaagggcaatccaccgttcctgtacctatacattgtattggcacataatcctcgccggcagctaaagcctctatattcattaagagcaagtcattttgtgtcttttccggcttagccatataggaaaccagaataattaacacaaacagcacaccaagcatccaagattttcttttcatacaatattaaatttagtattagatatttaaattagacttgtctcggaagcgaaggtagcaatcaaggaaatccgctccaacaaatctgactgacaaacactgacaaagcttcatttatcagaatttgtcagtccctgtcagaatttgtcagccgcatactatccatgtttttaggcattagtcaaagcatttttctcgatgaaatgggggattatcagatgataggaatcatttttgaactttatttgaagggctgttaactcaccgagtgattttcgtaaacgacgaataagcgtatgtattctttcctgacttccgctaccattcggccataaagtctcactaattagtgacgtagaaagcgtgtgtccttctgcctgaagaaacttttccaataagacagccgtttggggagtaagctttactacttgctcctcttttatcaattccatccgctccgcatcaaaaaaagtatgctcccccacctgataaacaggtgattgctctacagtcaccactataacaggtagaccttcttgttcgacctcctcaggctgcctattctttctatagcaatacatttttccaaaaatgaaaaataacaattcaatacctgcacaaacgcctcctatggcaagcaaacgccagtcactaagcagccaccaccactcgcaagaagcataaccggtagcttccacctcacaacgaaatcccatataataagaaaggaggctgtcagtctgggagaacttctgcacgtttttggaaaaagcagaagagggctgctcctgaaaatcccaaacagtaatacgagtatgggttttcagaaatatatcagattctttcaacaacttgttccaggttccatgtaatgagtccgcatctaagggagattcatccaaaagtgcagtaagaagtccgcgctgtataccccctttcacaaggctattctcaaatttaaaacatgggatttcatattttcttttgcctgaatccaattcaatctctaccaccccgggatttacctcctctaaagcagatatagctgtccaattgcttatatagggaattgagagagtatctcttttctgcaactcctgtaataatgctgttttaaatgtggcacgtgcttgttcatcccatttttgatgaaccagaaaagttccggctcccatagccaacgaatacacaagcagccttatccatagtatctttttgcgttttattttcatcattcttcccgctccattttaatagctgtttctcaattacaaaagtagggattcatacacttaaagaagaaaagcaatgttacagaaactttcgttcacgtttcatcattaccaatttatagctaaaaaaacttatccggactatacccgggatgcacttgctccgtaccttctccactcacaggtacctctgaccgaagaaagtacggccttgatacggagcaagtgcattccgggtgtaacggagacaggtcataatacaataaagaagatcaaagagttatctacgcaaattgacgcaaatgaacgcaaaaatcacaggaagcgggttgaagagatttattttccatatatttgcgcagtgacagaaacaagtaattaaaaacacgatatcatgggaattatcaaccagggcattctcggaggtttctccggtaaagtgggaccgatagtagggttccgctggaaatcaaactactatatacgtgcacgggccgccaaagtcagcaatccgcgcacaccgaaacaacaggaacaacgcggtaaattcgccacggcattcagcttcctgaaagctataaaacctttcatacgtattggctacaaggaatttacacagaagaaatccgcgttcaactccgctatgtcctacacactgaaaagagccgtgactggcagtggaaaagaaatcaaaatagactttgaccgggcattggtttctatgggaaccctgatgccgatatttgaaggggcagccaccgtcagcaatcatcaaatgactttcaactggaaagataatagtggtatggggaatgcagagagaacagatattgtgatggtactggtatataacaaagacagggaagcggctgtctatgatacagaagcagccctgcgctctgactgtcatgccggactacagctcccggaagactggcaggatgatgagttagtcgcctatctcagcttttgcagtactgacgggaactgtgtagccaatagcatctgtctaccaatatcagtaatagaaataccggaagaagagatagacgtacaaacggaatccattgatacaacgcacaaaagaatattacctgataaaagaacagtacaccaatcacgcataacagtacattcgctatccgctccacctaatgaaattcagacttacagatgtgagacttaacccgctatctccacaatccaataacgaaaaaaccggatgccagagaaataaattctccgtatccggctttcagtggtgcctatatctttatttagtacttgccagcatcaaagttgcgtcagcatcgttcagttcgtaaaagctcttttgaatattgctgtcgtaagcattgctcttggagttccaacgggcatagctaagttcaacttcactattggtataagaaacatccatcttgaaataaggaacccaagcctcttgtgagctgtcccatttggaggcttctttactggtcacacgattttctgtatcgtaagtataagtgtaacggaggtggcggaacaagtgaccgtcttcattcttaaagatagtcttagcggtcatcaactcgccggtcatctcttcattctttacgtactgggtaggattacttgcacttgcagagaaattcattacactggccattactactgctaacattacaactgctttagaaattaagttcgttttcataatcgttatttttttattgttattacttcttgattttcgagaggaagtctttgtcaaccgccttcgactatatatagtcaattggcgtgccaaagcagtaaatcactgattatcaacaaatattcaaatttaaacgatgttcatttccggacaagtgtccgcacaaaagcggacgataggtatggaaataataaaaaagcaaatgcaaatgaatcatgaatacttattctataccttagtgggtataatcaagatataaagacaaactatttatacccgatatggtataaacaagaagataattattatatttgtacccaaacgggtataatatggaatatatggctttagcaaaatacgtaaaagagatgcgtaagcagcatgaacttacacaagttgatttatcagaaaagtccggtgtagggctccgctttatccgcgaattagagcaaggtaaacagactttaagattggataaagtcaatcaagtattgaatctttttggaatggaagtaggtgccgttccaatgcctaaaaatgcagaattatgaagcgagcatcagtctatctgcacgattataaggccggaacattgacagaagatgaaaacggatatacatttttgtatgataaagattttctggaatctgctcacgcggaagcaatcagtctgactatgccgctaaccgataaaccttatcaggataaagttctatttcctttttttgacggattaatccccgaaggctggttactgaatatagcggaaaaaagctggaaaattaatcaacgggacagaatgtctctattacttgcatgttgtagagattgtattggcgcagtaagtatcatacctaatcaaaccgaggaataatatgggaaaatgtttgtattgctataaaaaattaagagaaggagaccgcgatttccatccggcttgctctcaaaaaatatttggtacgaaagtacctcctatcctcccatacgtcaggaatcaattagccgacttagcggaacaggtgatccgaagccaaaccacattaacaggagtacaggcaaaattatctttagacattcacaaaggagaaaggaacgaaccggaacgttttacaatcgtcggtctctggggacgatacatactgaaaccacaaactgatttatatccttaccttccggaattggaagatcttactatgcatttggctgaaatagtcagaatcaaagtagtgccacactctttgatacggtttcaggatggcgaactttgttacataacacgacgcattgacagacgtgaaaacgggacgaagctccctatggaagacatgtgccaattagccgaacgattaactgaatacaagtataaaggttcttatgaacagatagcaaaactgatacagaaatattcctccaccccaaaattagacctcatcaacttttgggaacaagtgatattttcatggattacagggaatgctgacatgcacctgaagaacttttctttatatagccagagtaaaggaaactatgttttaactccggcttatgatatgctttctacagtattagttatgcctgaagacacggaagaactggcactgaccttgaatggaaagaaaagtaaaataaaaaagaaggattttattatagctattaccgcttcgggaattgaagataaaatcatagacaatctatttaaaaaattcgcgaaagccgaacaaagctggtcagattttataagacaatctttattaccggaaacgatgcaaaaacaatacatcaacgtcataaatagtaaactaggcataataaaataagggagatccgttcaagtctccctcatcctgtatgcgattgatatagttatttagtgcttgccagcatcaaagttgcgtcagcatcgttcagttcataaaaactcttttgaatattgctatcgtaagcgttactcttggagttccaacgggcataactaagttcaacttcactattggtataagaaacatccatcttgaaataaggaacccaagcctcttgtgagctgtcccatttggaggcttctttactggtcacacgattttcgttatcataagtgtaagtataacggaggtggcggaacaagtgaccgtcttcattcttaaagatagtcttagcggttatcaactcgccggtcatctcttcgttcttcacatactgagtaggattacttgcacttgcagagaaattcattacactggccattactactgctaacattacaactgctttagaaattaagttcgttttcataatcgttatttttttattgttattactcttgattttcgagaggaagtctttgtcaaccgccttcgactatatatagtcaattggcgtgccaaaacaataaacatctgattatcaacgactatcaaaaacagtccagtgttcatttccggacaagtgtccgcataaaagcggacgatagatatggaaataataaaaaagcaaatgcaaatgaagcatgaacacctattttataccttagtgggtataaccaacaatatataaatcttattatcctatcagccagacatatctatccctacccgcttctccttttacttcaatagagcatcaatctttaccactgtctgcggattactgggtctcaacaagcctccgtaatctacaataattccatcacggttaatgagaaggaattgcggtatactgtgcatattccaatgagccatgatacgatgataatcatcagaagtcgcccaatcttccgaatagatacattcaatattcttccctctcaaagagaaacgttccagaatcttatgatatgcttcccgatctctacttccacagatactggccataaccacatcatcgggcgaataacgtttccgcagttccttcaaaggctccatttccgccagacaaggggggcaggttactccccagaaatcaacataaatcactttacccgcatacttttccaaaagattgtacacagggatcatgaacggcattttctccctggcagtcgcctcatcagcattatcgccataaagcatataatgggatatcgcttggggggctttcagataattcactttatcctgatatagtttaagcatgggttgccttaaatagggagcctgaactatagagtcgaattgagacctgtgatcagcgatgtaagttgtatcattatcgcataaagaggtacctatgggttggaggtataaatagggaaggatagcacgatctttgctaacctcaatcacatttgctaaatcaaaatcacttttttctcttcgggtatgctcaaaataaaggaagatatgtacattcgcggcaagcgaaaacagactggaaaaaacggttttccctgaaaagacagggtcaagttccggcaataatgctttatatccgctgacatccttgccatctgccgcttgtgatatagcattaccaaagagtgcagtataataatctatcagcaataagtccgccgtatactcttcaacttctgcgcccggcgaatgttctttgaggaagtcggcacgacgttccaggagactggcatactctgttttcaattctttttcaaattcatcaaagggtgcttctctgttataggagctaagtctgcgatagtatcctccttcggtaaaaagagccatatactgattcagcgcaccggaagtcccggtaatgcggggatgcaacaaatcgttgaagtcaatctcaacatgcagactatcacccgggtgtacatacaagtgttccgcataattgcgaagagcaacctcacgagttgaagcataagaactgaaacggaaacagaaagtaccgtcatccgctatgggagaagtgtaaactgtttccagaccggacagataaggtatctcaagtttcacctccttctccttcggataaacttccctgttaaatacacggcccgagattatcacttctttcgccaaatcttcatgacccttctgagccttacagtctaagaaagataaaattgcaaacagtaagcatagatgtttcatacgtattctataattaagaaatgactaataaattcagcgcaccgttacagacaggctctttccatatccggcaaactcaggtgcataggccgactggacagtagcaataccggtttggtaagcccccgaacggtctatatagactttatactctatttggacagtaccctttttaagtttgtcaataaagaattcagcagaggtatcacgcattacctgataataaccggtagcatcggaatgacgatatcccgacaatgcctccttgggctccatacatgcagcacgtgtatcttttatctgaacgaaatccatatcccgatccgccttcacggtcagccgaacagtaagctcatctcccacatgtaaatccgtcttcgatgaaacctccttgccgtctttataataggtacgattgattttcaatccgttgccttttgctgaatgcaatttatccatatcctccaggcattgagcatatacagctccccagcctattcctgcacctgtatgtgcaatttctatttgccgggctccgacctcattaccggagaaagaacgacggacataccctaatgcatcatcaggagtcactactgctgtcccggctatttccgctttcatggtactgttttccgccaatcggttatcatctccactcaagaaagcatacacagcatcggcagtagctaccggattatcccaaacctgcatttgtttttgtttaagcaaccattgcttcatttcagcaattgccagcggttctttcagaataccggataaggcttcaatagcaaccacttgtgtcggaattctgtaactgccccatgaataccgggctttcgaagtatcaaaatagcgccccatctcgggagtagcaacggaatattccagaatggatcgcgccaattcgtccgccttcacctttttacccgctttatgcagtatggtagcgataagtgccctgtcgtaaatcgcatcactcggagcaccggcctccaatctatcaatcatatacgaataagcggttttatcagttcgctttgccacctgctcatctaaagcacagatgtacagataatgcaaggattgctcaccgggtaatccgttcttattgcctttcttttcattttccttcatctgtctgtattcatccagccattgggtatggagatagcttacagccttttcatacattccctgcaccagaagggtagatgcacccattgtgcgaagccgtgccagcattttcacgatccgggtagtgatgtaacggttccccgtcatccctttataccagctccaggaaccgtcagggaactgcaatgcttccaggcgggataccgcaatacgattacggttactcatcatgttcaagtcaaacaaaagcgctatatttctcttccgctctgtttcatcaagagcatctgccagccagggagtttctttaagtaacagctcttttaattcttccttatcattaagattgcccgacaatgggcttccctgtatcttccaactttcaaatacctgccggatgcggggattggcatcgaggatggccacagacaatgaattggcatagtaagcacttgcccacgacaaagcatcctcatccacaggattgccgatgacgggtaaagcctgtatggcataccagtcaggattggccgtcagttccaccgtcagccgtttgtttgttgcagttttacttccatcattaaacagactctccagtgtaaccgatttactttccgtaccattcaattgaacgggtatcgcttcagtcacccattgtttatcggataaaaccggaagatagcgctgctcgccgtcactgaaattactaccctcggcaataattctgcaaatcaatatcgtaggttcctccgggctttctaaatcaaatgatacggaaacggttgctccggcatccgcactgaattcatgttccagggttgatattatctgatttgtctgcggatcgaccagttccatacgggctgttccctgaatgttttctccggacagattgattattcccgtactgataacaggtttatcattcacacgaataaaacgaggcatattaggctgcaccataaacgacttgacagctttcgccttagccgttatctgtccgtagtccatgttccgggtatgggcaaatcccataaacttccattcagtcaggctttcgggcaaagtaaaagatatactggctattccattcgtatccgtacggagggcaggataaaagaaagcagtctctgcaaaattctcgcgaagaggaacataaggagaaccatcatccaatgccacagcagcagagcactcaaatactgctacaacggaatttccatcccctacctcaaaaccgtcatccagcgtaacttcatccgtaaagctggtatttccggatttcatcatccggctatcttgcttaatatagtgattagcattaaaacgcggaacttgccagaacggagtattcagagtactatatatatcccaccaacggagaccacgcaaagtgctgcccgaataggggaagttactatacatccagatggaatgcccggaagatatcagattcgccccggtatcaggaataaaacgggagagactcagattgaagttccagtcattgatgtataacttatcgagtgaagcatcataaagagtggcaagcaattgcgcatcagccgctttcttgtccggatgcatgatctgaagtttccattcctcttttcctcccggttgcagtttgtcacggaaagtagcccatttcagcagtaagctcttttccggacggggacgtgctatctgtactttctttgtatacagcttaccttcgcgcataaaagcaaagtttacggtgattccatccccatattccggcttatagagataggtaaatttccggatttcattattgaggatcattcgttcggattcaatacgtttatcaccacagaatacatcatacagcagatagacctctttctcactactgcctacatacagattcaccggatgccgggcatcaagctctgccccatcctgatagaaccattccggtgagtataccggcaagtgagcgtctgccaatgaaaagagaataaagtcctgttccgccgtacaggctcttccctgcccgtcaaggactgaagcctccattctataacgtcccggagtgagagcaagtatatcctcgggaataaatgattgataggtcccaactgtacgacggcacacctcattgcctttgttacccttctcatccaaggcatacaccacgtaagtggcttgaagcgttacaggctgccggcttaaattcaatgccagaatttgtatagtatcccgcttttcacgtgccactttggagcgcaaacctttaatctgtaaggcaacaggctgctgtcctacaggtaatgacaaggctccgctctctatttctccggtcagactgattacttcagccgtcactttgtatgtatagtagcgccccggtttatcaggttggaaatcattcggttcacgcagaaagacagggaagcggaacttcccgtctgcatcggtctgcatctcacctacagccagaaccgtttcattgtctgagatcttccagaactcattcagtgaacgggttactttataactgagtttacacaagcccaccggaactcccgcaaatgtatttgcttcgccactgaccattagtgtatcacccatattataagtatcctgacagggatggaagacaacatcgaatgtaggacgcttgtattcgtctacacggatatagcggctttcgccatcttgcaccgatatttcgaattctcccgggagaagtacctcagggagtacgaaatcgccatgaaaggcgccaaattcatctgtagcaagggatatcttacccacttcctgccggttagcatcacggagcactacgtcattatgaactctggagaaaacacggaccgaatcacctgattgctcatacgctactcccgaaacatgcaccacctggccgggacgatacaacgcacggtcagtgaaaagagaaacgtgcttttcccactttcgtgaaccgggcacatgatatcccgcatttgaaaagcctgcataactaatctccatataatcagctcccggcttacggacatttattcccagccagtttcctacactgggtggagtcagaataacactccctttgccattcacaggatatgctttgatcaaacggtaaccttctcccggtgacacacggtaataggccacttcagtacccgttaccggatgtccggtcaatcggtctacgatattgatttcctgctttccatcgggtaatcctaatgatatggcctgcaaggaggagacataagcctttccataagccgtatatttacgatgtccgtcagggatagactttactacataaatgccctcaacggggaatttatagcgcagtaaagtatctgtttccttgtagtccggagtagctgccaaatcataatggcggctactgaccagttttccatattgacttaaagtggaagcatttatttccctttccaggacaggacttgtgacaggcagattcatccggtaaagttctaccgtaagtccggccagattacggtattttactttcaagtcaacgtcctttcccggataggcaaaaggaatttccaccattagtctgggagtcaatacttctgctatctgttctttcaaatcattggcagaaagtgaccggggatattttgcaagtccggtttgtgctgcttttagttttgcggtgtaatcctgcattctatcatagcgttctgccaactggcagtacacttctccgcaaagcggggaatcagcaaattcttccgcccattgttttaataacgttattacctgctcatcggtcagcctcagcttttcattcactccgccccgactgacgtcgtttcccttataatgtaacttatccagcatcaataataatcgggcgtctgtcatgccttgttggcggtagaagtcaatcagtccgtcataaatagataaaatctcgttttgtattttctcggctgatacagggttggcaataaaatagccgcttagccgggagatggcctgccgggcaagcaactgatacatattatcaccacaatatttctcactcagttctttgctgttggtcataggacagtaatccacagcagacttccggaaaagtatttctttatcttgcaacgaacgttggaaataagcgatggcagtatcaattgcagtctcatcttttttacctgtatccagaatataatatcccagcaggttattcagtatggcctgatataccgtatctttttcttcctccatccaagctttcaaggcggacaattcgctatccagactatcaggagtaatatcaatgcataaggatgctctcgtcagatgtgctttcatcatctgagacacattcttttcctgtttggcatactcgtaaatctttcgcaattcttgtattgcagatttaggcagttgcttttgttccagaacttcaacctgtttccacatttgttcatacgactgagcggaaacccgaagcggcaggcagataagaatacttattataccagcccaataaaacatatttctcatttgtgttttcgatttacgtccgacaattaacaggttcattcacaaagatatattttttattcttagggtagcatggctgttcagacttaataacataacaaatgccaacagcccaagaaaccggctaccggaaagcacatcattctgaacaaaaagttaccggaatgtcttttttactaacagatgcctctctgaaaacaccccaaacagaatcctgccgcataatccatggaatatacatgcacgttttctgcataaagcaggccgtatatacaatacttatgcaagagaactatacttcttccatgaaggaactatagatctgaggcgaaggatctatagatgtaacgcaaaagatctatagatgtaacgcgaaccatctatagatgggaaacaaacggtctatagatgggagacagaccatctgtttttctattattagagttgtacgtatttatgtattacactatcaatcaacaaaatattgattttcgttcgtttctttccgttcttccctgcatcgggacggaaatatcgcattctcactatgcataaaaagcaaagtgtcaaaaacgcaaacatatgcaaacacaccatactgcggtatgcccggaacgagagagtcgccacaatggatgaactgaaaggtatccgcaacttatccctctggacaaccgtatcttatcggaaaacttagaacctattcctttcaaacatccggttaccaataataagtacgaagcgctgtcctggtgcttcaaacacgagatgtggcacagtgccgaaatggaagcgataaaacgggcattagggcaccctgccaagtggatgtaattgggtacatcggcacaattaaaaattgtataacagttcttccaacgtaacaccactatccgctcccatcttttccatacggatacgtttcaggcgtttcttcacggaatcccgctccagatgcatcacttgtgccatactcgactgagacaattgcattttcaccatgcagcagtaacgcaagtcgtctttattgagacttggataagtctgctgcaaacgtttcgtaaagttgtcgaagataatatcagcattctgcacaatgtcatcccagtcttcatctgaaaggatgacattgccgcccttctctaattcttgcaccaccttctgacttaatctcctgaaaaaggtttccttcagccttgcttctttttgttccatttccaccatgcggcgaagactctcggaagtggccttacgttgttgcttcagttccttttcctgttgcacgagctgatgttgctgcgccatcaggcgattacggttacggcgatagatgaaatataccgcacttgccacccaaaccaacagcaaagagattgtggtcatccaatacacattacgctgcctttccgcagcccgggtgcgccaatacaggttttctaccgagagctgttcgtgtttgtaaagctcttgcaatgcaatggcttcctcagtatgacgatactttcgtatggtatcggataattcaataaagcgttgtagcataggataggcatctgaagcacggcccattttatgatatattttcgccatattattataggcgtcggccaccgaagaaggctccggactggagataactttctgaaaatagtgatatgccgaatcatattgtcccagttttccaaacaactccaactttactccatagagcgaaagaattcttgcagtatctttagccggacgaagagctattgatttatttatataatccagtgccttggcaggttctccttgctgagaatagatactacccagatttgtatagatgaaaggaagttgccgaggaacagaatcggctaaagccgcctcataggccgcctgagcatagtaaagggcgctatccaattggttcagaaacaaatatccggtagaaatatcgcacaaggccatattcttatagaacatatttcccaaatccaaagccgccttcaaggcttctttggaataacgtaccttaccggaatattcttcctgattcagacaaacaactcccaaccaggtattcacccggtagagctgctcatgattaccactattttgcaggaaaagcagagctttcagaaaagattgcatggcatcgctcatccggttaagccgtctgtccagatgtgctttgcagtaaagggcccgttcggcataaagagaatcgcccgattggctgaaatatttaattgccggtagcagcagggtatctgtagctgcattcaactgttgtttcctgtggactgcctcggacatcagtaaggcataaagtgcatagtcgtgtttcgataagttatgcaacggttctttaatctcattcattacggttatggcgctatccgtctcccgttccgccatcaacttctccgccaaggccacgcgattatcaggaccacaagcaaccaacataccaccccataggattatccctatcaaactcttcaatctcatcttcaatatcgtgttattcgtacgaatccatcatcacttctccagtctctccatgaatcaatatcactctggccatatccggctgaatggaatcgcgtatatcaatctcccacaccggaatacctttttgctcgtctatatactgatttacgctgacgtgggtggtatccgataaattaatattcctcagtttggcaaagatataaatatctctccatgtatacttaaaagctttttcacttttttcgtgcaaacaagagtcaggcgtctgtgtctgctcatcttcagggaaacgaacttctactttttccgatacttttgttgcggtcaccgaattgatcttccgtattactccccatcccagccagccgtcttccaactctattttaagatagatgcctcgttcaccgctgagccggtatgcagagtcaatgggtaagtagatgcgagtgtaacggtcaccttgtataaatatctccccgtaagaaaatgtattcagcaaccatgcaccagaacggggaatgtaactcttacgcgtcctgtcgtgtggagcgatattgacaattatatactcacgggtctgcattccggaagtaaagcaactgttcagccagaacagaaagacaaccagcacattggtacataatcccactacaatacctccacacacaaaggcagagacgaagtttctccaatgataccacttcccagtgcttttcttatagatataaaccatgcagctacacatcgttattgccataaggagaataacgattttccggttcaatcctaaatagctgccggaagaaaatgcagtatgcatcagcatttcctcttctatataccacatcctgcaatgcaacaggaaaagaaagacaaaggcaggcaccagaattttccatagtgccgttcttttcttcggctgctgtcgggaggcatcttcgccatgaaccggttgctgtttgggtttaaatttctttctgctcataaatacggaaaagcgaagtgattacttggtttcttcccactctttttccagcttaccatcgatatcatagagtttccatcgcccgatgcgccgcccattccgacattcacccacttcacgtatacggtcgttcttcacgtaacgcgactcaaacggaccgctctgccggccatttatgtaggtggatatttcccagtaatcatagcgatttgtaactatcagacgacgttcttttccattgatacgaccgtattgataggtggcttcataaataagttcaccattctcaggatcgtactcacgatagagcccttctttacggtcatttttcatgtagaattcacgcttacgggtaccggttttcctatcaaacgaaacatgcaagccttcttccctgccattgacataggtttctatcatcaatgtatcaccactttcggcaattgtaatccatcgcccatctttctggtcattcttataatgccccagtacatgaggaagcccaaagataaatatggaagaataatctccgtctttctgcccgttctcattataataaacggtttcatgaagctcataggtccctttcatgaaagtgaattgcttgcctacctgcttaccgtctttatacgtatgatccatgcgcaatgtgccgtcaaagtcatagcttaattccttaccatcctgttttcccatgcggtagttcctttcgcgttccactttaccggtggtatagtaagttttgtgcgcaccgtccaatttcccgtctttataagacttctcttctttcagtcccccctcatcggagtacatcttgaagacaccgtttttgcgtccctctttataagcaccctcacatatcagtttgttgtattcatgctcttcatacttaccattgtaaaggccttctttaaagtcagccaggatataggcagaatgataaccgtctatgatacggtgctcaccatccaagggtttatcagtcttcaagtcccggaacaagatgcggccgtctcccatatttatagctgacacctgctctatctgatactctttctgcgcacagacattcagaaaggcaaaaagcaaaaggccaataaataaaatcagctttttcattatgtcctacaatttaagaatcaatcgttttccgcatctttaagcatctgccttattacatccgcatgatcgagataatcgtttcctgataaggtcaggacattggtcagaccgataatgttgctgtcagaatcgtaagaagtcagtaaacaatacatctcctgccctaatttatcctcttccacatgaatctggaccggtgcgctgtatgctccgggcaactctgccagatactcaaagtcttttctgagaaacgcttccaggattctgtttatatcggtttcatcgcgtttgaacttcttcaaacccacctcttttatcttacccccactctcgctattataataatcgaaattgctcagatacgctgcaagcagacatattaatacagcaattactcctaccgtccgaaccaaccaacccgctacagggataaaaccaggaaaaataacaataataacagcgactacagccaatccataataaagcatcggcttaacattgttctttcttttttcaaatttcaccgggtttgctgcatagaattcacccatatagcttgggtagagttttgtttgattttccataaatattactttttataatgattaataatagttccatctttcctgattatcgtatgaaaacaaaagtaaaaagtaacctgtaaataatgaaacaaccgtgggggataaatgaaggggataatccataaactaaacagctgtttttcaaatgataactctatataaaggatagacaaataaggggacatttgcataaaggaactgattccatcaatagcttttcataaagaaccaatgaaggagcaacattacctgctaccagacatatactttcttgcttgtccccatatttttataattactactatctgattcactttcccgaatcggataatatctttttctggaatcagatattttctctggttcatctgcaagaaaggcaattactttcataacttgtattccaaaacaaaaccgggatgatgagatataaatctcatcatcccggcatttacttcctaattattgatgttttatttcgtacttgccaacattaaagtaacattatcatcattcatttcataaacagtctttttaatactgctgtcgtaagcattgctcttgaagttccagcgggcatagctaagttcaacttcattgttggcataggaaacatccatcttgaagtaaggaacccaagcctcttttgagctgtcccatttagaagcttctttgctggtcacgcgattttctgtatcgtaagtgtaggtgtaacggagatggcgatacagacgtccgtcttcgttcttaaagatagtctttgcggtcatcaactcgccggtcatctcttcattctttacgtactgggtaggattacttgcacttgcagagaaattcattacacttgccattactactgccaacattacaactgctttagaaattaagttcgttttcataatcgttatttttttattgttattacttcttgatttttgagaggaagtctttgacaaccgccttcgacaatatatagtcaattggcgtgccaaaacaataaaacgttgattatcaacaaatattcaattttaagcgatgttcatttccggacaagtgtccgcatgaaaacgaacagtaaggacaaaaaaatattcgagacgcagtttagtgccccgaataattatagtaatcgaatagccggaactatacgttttcttccagcatcagccccacacctttcaccgttttaatgctgactgatgaatcttcagctatcaacttacggagtttcgtgacgaatacatccaggctgcgggaggcaaaataatcatcttccgtattccagaacttatcaagaatggcttcgcggcgtactacatctcctctgttctcacaaagcatttgcaacagtccggcttcacgggcggtcaatgtcttgttttcaccggaagaatgtttcaatatggcgtgcgtagcatcaagcacatattcctttccaatcttgtaacattcgctttcgtccttactcttttcacctttggagagtttcaacaaagcatgaatatgggcatccagttcttcgggaatgaaaggtttcttaatataattgttggctcccaactcatagcctttcaatacatttttgggagaaaccaaaccggaagaaaagattataggcgtctctttatccacctcacggatacgcttcaccatctcataaccatccatgacgggcatttctatatccgagagaatgacatcgggacggtgttccctccacattgccaatccttcttcaccattggcggctgccaacacttcatagccctctatgatatcttccaatccgctctgaacgatgtaacgcaggctgggatcgtcctcaactaacaataactttattgtatccatgtctttgatatgaattgtattaactttctatactataaattatcaattaaccttcgctcttccaattcttgcttaagcgttttcacaagttgctcctccgaaggtaaataaatctggtatttacttgacaatatggtagtgttattttctggtagcgaataacgaactaccatattatttttatctgcacatagcaatatcccgatagtaggattctcttccggaagtttttcctcccgatcataatagttcacatacatctgtaactgtcctatatcctcatgggttatcttccgggttttcagctctataacaacaaaacagcgcagcagacgattataaaaaatcaaatctgcaaagaattcgtcatcttcaagtagcagacgcttttgccgggccacaaaagaaaaaccatttcctaattctaacaagaaatcctgcaaatgggtaatcaatgcctgttcaaggtctttttcataatatgccgcttcctttttcaaaccaagaaactctaacaccataggatctttaatgatttccaaaggtgtctctgggatacgctctctacgtgctacagccaaaacagcctccttatcattacttaataacaaacgttcataaaggcctgaattgatttggcgttctaactcacgcgctgtccaacaattgttcatcgcttccagttcgtaatattcccgcttatccggattatctatttgaataagaagcctatattgagtccaattgaattgtgaacgcagtgcgttcacaattggataagttttataaaattggcggcagaaagccaattgacgataagaaaacccactgccaaattccgggacaagctccttagagagatttttcagtaagtaagctccataatcggcacgctcctttccatcttgttcctcttcaaaaatacgcttcccaagtgtccaatacatctgtacacgacagaagtctacacttcgtacagcattagtgcgtgcctgctggatgattcctttgatttctgaaagaaaatctacctttaatgacttatctaactccatctttatcagttatgatatcagccacaaaagtaataaattattcgttaacccgaagataacattgcgatatcattcattcttattctgattaccgcaagcatgttcttcacaaaaggatatgcccagcaggcagaagtccttacattgggagtcttccacttcgaatttcccaatctggatgtgcaacaagtatccgaagaagaccagatagatgtactatctcctcaatatcaaaaagagatagagttaatatccaagaaactggcacaattcaagccggatgccgttgtcattgaatggcctttatacaaacagtcagagatagactctctctataactcataccttaccgacaagcatgagttgaacagaaacgaaattcagcagttaggtttcagaatagcccgaatgtgcaatgccaagatatactgtgcagatgcttggggagcacacactacccacatagagaaactgctggatgatgatgaaagtaatgaatatctggcttttgaagaaagcttctcgaactctcccgactctgctttatactatgaagatgaacccatcttcaagcaacagggaatacttgcacaactgatacatctcaatgatccggtacgtatcaagaaagatttaggaaactatcttatcaagcatttcaagtatgaatccgtcaaaggcgattataccggaacagattttgaatccggaagatggttcaaccggaatctaaggatactcaggaatatccagcggattcccgatgccgccggtaaacgaatactggttattttcggcgcagcgcacatgaacatcctgaactatctgtttgaatgttctcccgaatacaaactactgaatataaacgattacctgaagtaaatatctgcttcttctattttatcggaaatgagaactttggcggcctaatcgtagggccgccaccaaagtcaccaccgccacgtttatcaaacaccacgttgcgcagaatctcgtacattattccgcctacatccaaccccagcttaaacttctcgaagcgataataaggtatcacaacgggaaccgtctgccaacctccacgcatggcatcgtaatagcgctgggcacctacctccataccaaaacgttcggacatatcaagagacatcgtagcaccataactattagtgctcatcccataagaattaccgatatcatacgaaccgaagacattgaaggcaacccggtcggaggcacgataagtcagcctgcccgcagtactgaaagcttgcccggtgatgtgagacatatttatcttcatggcattggcacgaagttgcaacgatagccgatcattaaagatatgctgatatcctaacgaagcattattgaaacgcccgatgcctggaagactggtctggcttccggaaccgaataccgctccatggggaaattgccttaatacgcctcctgtgctataatcgccccggaatagcggagaaggatttatatgataaggtatacggagttcctctttcaaggagaaagaaggtaaatcacctaactgtataggatttatcaaagggtatacggtcttttcgggaagcaggttgacggatggaagctgaaatgcagctttcggctttatcaacatgctatcaagagtgaagcgtgtactatcttcctgtgcagaaagcaactgcaaaccagaaatgaacagaaaaaataatccccaacgaattgggagccaagatatgccaaccctgcgtgtcataatctacctcctttgttttttacggactctgtatacaaaaatagtaaaagcctatctgaataacaaatagttgagcacatttcatctttgccagcaggcttttttaacgcaaggggaattgtagcgtaaattcactgtaactcccttccatactttctaccttcaccataccaccgtgagcactcaccacctgcaacacataattcaatcctaacccaaaacctgatgcacccgtcttacgactgccggaagcaaccctctcgaacttattgaatatcttatgctgttcgctcaaaggaataccaataccgctatcatgcactctaacaatggtttcatcctctgtctttttacctgaaagaataatcagaacctcttcattagagtacttgacggcattgtccaccaagttggaaagtatctcacgcagacagaaagcatccgcataaacactacatccttcttcacaatcgatatcgaaatgaatcgtcttcgctgctttcaactgatacttttctgctatatcccgtaacaacggccttaaggcaacttcttctttatgtagttccaattccccacgatctatctctgtcagcattactacacgattggaaagtgtcaacagatgttcgcactcatctcccattacttgcctgtaacggaccagcttctcaggcttatccgccaacttaccacttgccaggatatgtgctcccatcatgacagactgcaacggtgacttcatatcatgtatcatggagtaagtaaagtccttctgaaactgctccaaccgacgctgtgcccgcaacatacgtatctgaaagaaaacacagagagatacgaaaaggaaagcaataagcagcggcacctgcatataccatgtggtactcataatagtacgttgtggtgaacgaaccacagcaaagatgcaactcgtactatccttatccaacggaaacaaccgggtagtaatatccccgaagtcaacagccggactaccagtataaagtatcaactcccgggacggatacctgatccaacggatatccgctctgtccggaaagcctgtttccaaaagctgtttcctgaaaacactgtcggcaaactgtaaggagaacggaatgggcacacggctacgcagactaatcgtatcctgtatatcataagccatctttacgcggaaatcttcatcaaacttattgtaaagatgtcgtatgacactcaactgtacccggtaacgataacctttctccagatataccttataaagctcattcatcatacgcctcggataagggagaaattctcccggtgaactatcccaattaaaatcaggattagccttagtgaaaagcggatacctatgtaagtctgcctcccggtagaaagcctcttccaattgctcctccgcctgataccgtatcttttgagatgtagtataatacaaatatcccgaccagacagccaacaacaggaatactcccgccaggctgactatagaaattgctttaagagaaacaggcctgcctgtacttccttgccggatttctgctttggcatgtgccagagtagcattggttctctcaaagagtacgttgctttgtgcctctatctcttgccagttttctgtggtgatcaagttcttcatccggctgacgggatgtttcatttcttcggccaacgtatagaagtcctgttgttgtttctgcaagttatgccgttgacggaacaccgacttcatctgtacaatcaaggcataaacagccgtacccagcaatagccatgtaatgaatgacagtaacaggagtctcttctccatctccttggcagggaaagaaagaatggcacggacagcctccccacgggatttaaaggtaaaagcagtttcagaagtaacagcagcaaagttacggatacttacctgaggattggtagttgccagcacctcatttgtatttacattaatgcgctccacggtcagcgttccatccatgtctaacttccgcaacttattgtgcagcacgctatctatggtggctaacggaatttcttttattccatacacccgttgcaaagcctgtgccacttgctgggaagtacgcttattcctttcattcccatcaatccgcttgtatttaggattaggggcatgcgctatgatagctattgaattatcaggataaggaaggttgttcaccaaattatccactgtctccgtgaaagacatccaaaaacacttgtttagtaacttctccgcttcctgcatctgtgcatggaaagcataaagcattccgcccaactgtatcaacacaacagcaatcagactcacaagtgaaagagagatgacagtacgtaatttcatcttatccgtttatattcgcctgcaaaaatagcaaataactatggatcgcggagtaatgtattactttttatatgcgatgagaatgcgttctttccagccaatggcaaggtacgatgaaaagaaacgaacgaaaaacagcatctcactgattaaaagaggaatataaaaatacatacaactctaaaaaaatacaaggaaagttttccagagttgcaaagatatcgttaacctaatgataacattacgataacattcatcctcatgcccctgccctatctttgcaacatcaaaagtaacgaaatatataacttaaaaaataaaatcattatgaaagctctagtattatcagtagtattcgcattgacatcagtagtaaacgcagtaagtggtaacaacgtaaaagacttcgcttacaacagtgagaaacaggaaagcggtgtagaaacccagacagtctataaagtaaaagaaggcaagtacctggaacgccacctgcaatacaactacacacatgatgaaaaaggacgtgtatccgccaaggaaattctgaaatggaaccaagacaacagtcgctttgaaaagcagtattgccttaacttcagctacaccgacaacgaagtaaacgtggaatatgtagcatggaacagcaaagccggcgattacacaaatgtgaaagctaaagccgtttatcagacgaatgaaaatggcatgaactacatggcttatagctggaatgaaaaggaaaactcctggaatctggtgacaaaacacaacgccacccactggagcagtgtcctgctggcaaacaagtaactttcctctaacaataaacaccctcttttaaattcctaaagaaatgcggctaccggaaaagcaatcctccgatagccgcattctttgatttacccaatatacaattcagagggaatcagtttaaaatccacaaactggttctctaccggattggctttcaacaagaaaggaacgataccatccgaaggaagcgctttgcgcggaagagccgattgcttatcgaatttataagtagcacaccaggcatcggcatcaccggatacgcttttgccgatacggaagcaaaactcactctgactatcgcgcaacgtattaatcagtttacggcaatcatccggcacagtaggactatctgacaattcgctgatcttttctgccatttgcgataaccattccacatcgtgaatgtgcttcttgtcgagggcaaaaacaaacactgccggatagtaatcgttgtctcccggtctccacaaagcactgttggcctgcaccactgctgcatatataacgggagactccgtatatttcttcttccagcgatccttgaacaaccagggagcattgcctgccactgccctgaagaagggagtttccatgtcccggggtgtttgcagataaggtttcagtctatccaagcgagtaggattatcgaaagcctcctcttcttcgtcatcatcttccggcacgggcggtctgttacgcagtccgctcacgtcacacccttgcgcttccagcttcgcaatatcttcttctgtcaggttattctcccagtctttgccggggttcacaaaaaatgccataataattttagtttaagagttaatattctgtcaaatagttaatataataatacatattagttaagcctctaaggaaggtgtaacaaaagtaggaagatacccatgaacgggaaaacaaataggggggataaataaagagggaattttatcccgtaagagtatgtttatcaagatgttattacccagtaaaagtaagaagaaaaggggacattttcaatttaccaaagaaacagcagatgttttaaaggaagaaaacaaagaattcctatcttaatcattcaaagttcctgatttcacaatagtctgaagattaagattattacaagtaatccattggcggaattagttcctttttgtagggttatgagttaaatgataattccaatattaagtaaatagagtatctcaattcccctcatccatcggaggaggggtgcccagagggcggggtggtaggtaaagcaagaaatacctatgaaccatataaattaaggaattattttctcacctaccacctcccccttcgggtactcctcctccggggaggaggagaattgagatagtattgttcatcatttgattcattactttccgtaaataaatcaattccaccaacaggttacaaataaggtatctccatagtctatatctatagagtatccattggtgaaatcaagatagaacctgcatatgagaatactataaataagaagagtgataagccgctgtaaataagaccagtgcctacttcttcaataagacattattaatcagatattgttctattatggagaaacataagctccactttatcggaacatttgtctccttattgtgaaacaagagtttcttctctgagaaacctttgtttcttacctaaggaacttttatttcttaaccaagaaacttttgttccacaggcaaggcacttttgttccaagagaaagaaacaaaatggaacaagtagaggcgtgacaaagcaccactgtctccctcctcaaccacaaggaaaggcataatcttacggctatacctctcgcttgacaacaggcttatttgtagaattccaccatcggattaagaaactctttttattaacctaacgataacattacgataacattcatcctcatgcccctgccctatctttgcaacatcaaaagtaacgaaatgtataacttaaaaaataaaatcattatgaaagctctagtattatcagtagtatttgcattgacatcagtagtaaacgcagtaagtggtaacaacgtaaaagacttcgcttacaacagtgagaaacaggaaaacggtgtagaaacccagacagtctataaagtaaaagaaggcaagtacctggaacgccacctgcaatacaactatacacatgatgaaaaaggacgtgtatccgccaaggaaatcctgaaatggaaccaggacaacagccgatttgaaaagctgtattgcctcaacttcagctacaccgacaacgaagtaaacgtggaatatgtagcatgggacagcaaagccggtgactacacaaatgtaaaagccaaagccgtttaccagatgaacgagaacggcatgaactacatggcttacaactggaatgagaaagataactcctggaatctggtaacagagcacaatgcaacaaattggaacagcgctttgctggcaaacagataattactctaacaagaattctctcttacagtttccaatgaaaaacgcggttgccgaaagataatctttcagacagccgcgtttgcaattatcacttaaagtcagtcttcgtgtttagaatattcagagggtaattaattatgtaattagtttagccttagttcatccgtcacctggcaggcaaggtttatgtcattgtatatctcttcaagcagatactcattgtccagtgcctgtttgcgaagacagaggaagccgtcgggcatcattcccgcatagtaaaaagtatctttgctgaaagagaacatcatatcgtgcccgaatgtttcgcgcagacgggtaatctgacgcatgattgccggtgtaagtatcatacgggcggttacttcgtcatcggcataaaccacgaaatacttctcgaaatccgggtcttccagatgaacgaaacgggcattatagcgtttcttcaagccctggatattctttgccagatagccgaccttttgttccagatggtcgggcaggataatcgtgctacctttaaaactacgttccagacgacaccagccaaacattccgcggaagttatgcgcactgctttcatacctggaggcaaacagcggacggagcacatagcggtaaagcatcacgaaatagcccgctacagagttgagctccaacttattcatcagcccataggaaacccctatatcggctatataaagggtacgatcccctcgcggcacttccagataagcataggtggtagccgccaatgccggatcggaaaaagaagaattaaagagcttgctaccggataatatacgctggtccagttgcgaagagaaggagaaaagaacggatggaaacatagcagacataatgctgcgcatgatatcattttcctgcctttggaatttcataagagagcggctgaatgcgaagttcagcacaataaatcccataaaaaccgggaaaatgtattgcgtaaccacactgtagttctctaatccgatgtatccaacaagatagcccccaaacaggacgaacatcatccagcaaaagacaaagagatagactatgatgctcagaatacgaacgatcttttgccagaaatatacacgggaaagttcggtacgaagcctttcggaaaggcttctgaagtcaattgattccatattacatctactttaaaagtgcactgacatccacattccgctgttcctgttcggaaatatcaatcagttcttcctgatgatgattctgccggcctgccacgatggaagagggaaacatctcaatggagttattatagtcggtgaccgcagcattataggtgcggcgtatggcttgcagttgcaattccatatcttcaatgctcctttgcagccgggtgaactgctcgcttgccttcagttccgggtaatcttctacggataattgaagtttggagattaaagaagaaagctcattaccggtttttatctgttcactctcctgtgaaggctgaaaagttcgtgaacgaagttctgcgatacgggttagcgtctcattttcatgtcccatataggactttacggcagctaccaaattcggtatcatatcgttccgctgcttcaatgccacgcaaatgccgctacggcattgctttacccgattccgctttgctatcagattattggcagtccagatataccaaagtaccaataagatgataagggctattccgatataaagaagtattccctggttttccataattttactttctgatatagattaataatagttgtatcgtatctacttacgagaacggaacaaaaataagaagatagacataaaacaggaaagaaacaggggggacaaatagagagtctcatttttattataaatctatgtttttcaactgattattatcattaagcagagaagaagcaaggggatattttcaattataaggggaatagttcaatagaataacagacaaaactaaggataatgagctaattcatgctgaaatagtaatgaatcaaatgatgagcaatactatctcaattctcctcctccccggaggaggagtacctgaagggggaggtggtaggtaagaaaagaagtccttaggtatatgattcataggcatttcttgctttacctaccaccccgccctctgggcacccctcctccgatggatgaggggaattgagatactcgatttatattggaatacccatttacctcataatcatacagaaaggatttgccagcaagttttattagctctttataccttactaaacttgcataccgacttatgatcgttaacctaaagataacattgcgataacattccttctctccctgccgccttacctttgcaacatcgaaataaccccaatgtatcacttaaataataaacaagtcatgaagaaatttcagaaaataggaatcgaattagcaaaaggtattgcaatcgttttggcagcttacgtattaatgaccacagtcaatcctgcgtacacaggactcaaacacgccattgcaaatatattcttcaattaataaaaagaacgaatgatgaaagcggatatctcaattgtacaaagcaagaaaggaaccgaaatcatggtttcgggaaataagatcaacaagtatggcatactggctgcaatcctttttacagtacccatactgctcttattccggtggatacatggagaagatatggctcatgtatcattgctgatattctggtcgtgtgccctggcaggctttggagtaaatctattgcttcatgcactattcttcggaatcttttcgcccaaaggtttccggtccatctcttttgtaaagcataagggaggcatacgtttctgccactgcaacgaacccatcagaatgtggcaatatcgcacaacctgcttcttacctattctgttgttaggcatccttccgcttttgtacggcatggcaacagggaattattatttcacattattcggaacattcttacttatcggtagcatagacgacctctgcatcctttggaaactgcgttcattcagcaaagatgcatttatcaacgactgttcacaggagttgcgattccacatatggtaaagtcaggatcgtgccggaaaataaagagtaaactcactgaaacggccttcttcactctccacctctaccctgccctcatgtgccagcatcacttgctgcacatagttcaaacctaagccaaaacctgtggctccccctttactgctgcgtgctgccgccgcagagcgttcaaagcgattgaagatacgcgactggtctttcaaggagatacccaacccgttatcgcataccttaattttgcaaactcccctttccgactcacagataatgtctatcttcacctcttcacgagaatacttgatcgcattgtccaataagtttcccagcacttcacgcaggcagaaagcatccgcatagaccgtctcacaacgatgataaaccgtattgaattccaccctcttaccggctttcagagaaatcttcgcaaccagatcatcaatcaacggacgcagggaaacatcttccttatgcaactccaaatgcccttcatccaattgtgtaagcatcaataccctgttcgataaagccagcagatgctcgctctcttccgtcatcaccaggcggtatttctcttctttttcaggtttacccgccagttttccccctgccagcacatgtgccgccatcaatatggagttcaacggagacttcatatcatgaatcatggcgtaagtaaagtctttctggaactgctccagacgatgttgcatccgaagcaccttcacctggccgaagatacaatcgagcattaccaggaatgtaatccacaggggaagcaaaagataccagatagaagtcgccacatgacgataagggttcttcacaactccctgcacgcaaagcgtactatcttctttcaaaggaataaactgagaagtataatcaccatacttcctggaagcgtatccaacctctgtaaccgtactatccgaagaatggagaaactgacgaataccactacgtgactttatgcccaaccggcttaagcgttccgcaaaagctgaatccagatatagagaagataagggcatttctatgctactttcattgatctcacgttgcataatcaaggctgcacgaagacgataattctgatcaatcgtattataggtatgtaccacaaacagacggtttatgctatactcagcctcctttccttgtaaaaatttctgttgttccttggcaaaaggagcttcctctggcaatttctgttctacggacttttttcctcctttagtctgtgaaaggaacaacggataacgttccaccacctcatcatagaaagccgcttcaaagcaatcattcacctgataagcagtctcacgggcagctgtgcgatacaaataagcaaaccaggctaccatcaacaaacaacttgccaacaggctgactatgaagaataccttaaacgaatgttgtttacgggcctggcgtttccactcctcttctttagccatggaaagtgtttgctccgtcatatccagaatctgcctgctcgatgtttctatggcctcccactgttgttcgggaatctgcctgcgtaccttacctatcggcaacctcattttctccgccagagcatagaaagcagagcgctgttcctcaatcccccggcgctggttgatgatatacttcatctgctgtgcccaactgtaaataaggaaagcagtcaataacagagtaggaaggaacaggaaaaacacatccttcacaagtggaaggaaaggagaaatgatggtagcttctatcgctttacccttactttcattcagccatgcctgctccgagataaccgttttgaaacgcctgtaagcggaatatttactgtgatcttctaccgaatcaatccatacggtcctatcgatattcttccatttcagcttcttttccaataccttctccatctcatccagcggtatctccacatgataaacatcttccagaaaagaggctacttgctgatatcccaaaaataccatttcatcgtaaggcatcttttcatccctgcggatgtacgaatagaatggtacggtataatcaggaaaaggcaggttattcacccggttatctaccgtttctataaaagcttgccggaaacattcgttcagtgtacgcttcgcctcatttttatagctgtcataagcatatatcatgcctcccaattgtattaccacaacgagaaacaatcctataatagagaggatatagagtgagcgaagcttcatcttgctattgtttgggggacaaatataacgttttcagcatccatttccatacaggaagaacatgaatcgtatattcactcacatttatttcttcctcttcttcaagagtcagaataaataattcacggcagcctgtagtttgagcagcctccaaaagaccgtctatctcccgttgacgagtatcttcgtcgtgcaaagtataagtcacttgaatcaactgattcacttcttcatggttagtaattacaaaatcacactccttcttacctttataataatgcaaaccttcctgtatttgcaaattccggcgtaaatgaagataaacggcattctcaagtaatttaccattatcttcacttagaggattaagcaacacggaacgtaaaccgttgtcaatacaatagtatttcttatctctactactctcttttacgaccgaaggctcatacttcgttaatgaaaaaaacaaatagatagattctgtttgtacaattacatcatacagggtattctttccgatactaaccccctgtgacttcaactcattataaatacgattgatagaggtcggtttcgtcaaattactcattactctcttaatgaagtaacggacaggttccgaattctttatttcatatctttccaccaaatccttatagagcattacgaagaaatattcctgcagaatacggtctttcaacataggaatagcaagactgacttcgggaaaaccaccttgatgcaggtacactttaaatgcatttacaatgcgtgccttatattcaggtacataataattggtatccacgcctacaaatgagcaatactcccgaaatgaaagaggaaactcttcgtactgcaatgtacgcccccgcaaggaagtggcaagttccgacgaaagcatatttgaattactgcctgtaataaagatgtgtctacactcctgttcatacaccctatgcacaaatggttgccaatcttccgccatttgtatttcatcaaagaacatatatacatccttcaaggaaatatcaggatatagttcccgataagcctgcaatatttcatcgaaattttcagcatcaaactgcaaacgctcatcatcgaaattcagaaaaagtatttgttccttccggatgcctttctccgaaatcaattgattgattaccaataagaataaagaagatttgccacaacgtctcacacccggaaccgtaataattttgttactatctacaggtagcatcaattcacggggatatacttccacgggtaagcccgcctggaaacctgcaatcaactgttttagtaattccttcttcttcataaagataatatattgaaattatttctttcttgaaaagacaaaaatagaaaaaactttctttttgaaaaagaaatagtagacaaatcaacggattttctttgttaacctaaagataacattgtaataacattcttccatgagcctctgccttacctttgcaatatcgaaaaaaacaaaaatgtataactaaaaaaataacaccattatgaaaactttagtattatcagtagtatttgcagtaacttcaatcgtaaacgcagtaaataacaacagtctggaaggttttgcctacaacacccgcatggatggagatcgtgtagaaaccaaaaacgtatacaaagtgaaagaggataaatatcttcagaatcatctgcaatataactatgcgtatgatgccgaaggacgtgtatccagcaaagaggtatcgaaatggagtaaaggcaatcaacgcttcgagaaacagtattgcctgaacttctcatacgacggtggagaagtaaacgtggaatacgcagcatggaacagcaaggacaatgcctacaccgatgtaaagaccaaagccgtttaccaaatcaatggaatgggcgtaaattaccaaagctacgaatggaacaaaaaagaaagtagctggaatctaatggtagaacactccacacaaccggaagaaatcattctgtttgcagagaaataaattcaggcatcgcaaatacacagtaccttaattgtgcatttatcctgcttttttcctaactttgtcattaaatcatttaccattttgacaatgaaaaaagaaaaccatatagccttacatagcacaagtttcattcatgaaatcaagcaaattgtaactgaagcccgacagaaagcctacaccgccattaattcggcaatggtagaagcctattggctgatgggcaagcgtatcgtggaagaggaacagcagggaaaagaacgagccgactacggaacacaactgctaaaagaactctcgacagaacttacgcaagagttcgggaaggggttctcagtccccagtctttacaactatcgactgttctatcaaacctttcccgaaatattctctacaccgtggagaatattgagttggtctcattacaagcgcttattaacagttcccaatcctgaagcccgtgcatggtatctaaaagaagcacaagagcaaatgtggagttaccgcacactcaatcgcaacatcggttcacagtattacgaacgtctgctactctcgcacgacaaggaaaaagtggaaacggaaatgaagtcgctcacgcttccgtaccagcaggacaaattggagttcatcaagaatcctacggtagcagagtttattggattgtccccgaacaccgactttaccgaatccaaactggaatcggctatcatcagcaacttacaacgtttcttgcttgaactgggaaaaggattctcgtatgtaacacgccaaaaattagtgcgtaccgagaagaaagactatttcatcgacctcgtcttttataattatttattaaaatgtttcgtccttatcgatttgaaaacaaatcctataacacatcaggacgtgggacaaatggatatgtatgtgcggatgtatgatgaacggatacgtggtgaaggagataacccaaccatcggtatcgttctctgttcagaaacagacgaagatatagcccgctactcagtactacatgacaataatcaactttttgcttccaaatatatgttgtatatgcctacggaggaagagttacgcagggagattgagctacaaaaaacattttaccgcctgcaacactcggagaaaggtatcgaagaagaataatactatttgctgaagaataatctgccggttatttctttcctgccatatatactccccccataatacaagccgccccgatcagtgcaataattgtgagatgttcatccaacaggatagccgatcctaccaaagtgaacagtggattgagataaatatagttggaagcgcgtaccgttcccagatttttcagtacgacattccaaactgcaaaacaaatcagggaagcaaccacacccagaaacaataaattcaacagaacggaaggctgaatgagcaaagacaggtcagccttccaaggttgaaacataaagacgggaagcgtagtcaatatgccatagaaaaagatcttgcgagtaataaaaatagtattatacctacccgtcatcttcttcattatcagactatagaacgcccatgaaagagcagcaaccaaagtaagacaatcacccaacggagatattttcaaaacaaaactcccattataaaccaccattgccacccctaccaatgccatcagtgaaccgcctattaaagtgcgggtagccttttctttcttataaatcatcagtgaaaaaatagtggtgagcaacggagccgtacaaacaataaacgccacattggtagccagcgtaatgcctaaagccatattctccgtcagaaaataaacggaaccgcccgtgatgccacccaacaacaaccaaagttcatctttccagttatttgcaaacagtttgcggggagatataaaccagataccaatataagcaatcagaaaacgaagcagaaagatttctttcggagaaagtccattggctattaaaactttggtggagataaaagttaatccccacactcctacggtgaagatcgctatcagatgataggtgtaatttttcttctcattcatacgttcccgataaattggaggcaaagatataccatttctactttttgtacaataaaacaggggatttaatagacgtcggaaacgtttttaataaataagggtgacgttttttaaaaactttacccacgtttattaacaacgtgattagagtgcttttcagcaatctggcagaaaaataaacaaaaagggatgtaatcttctcagacttcatcccttgaaatatcctaaaaacacttttgtgtaaaatcctattgaattaacttagccattttttgtattacattacttgaattagttttaataagcactttacaaatataagcaataaaaattactttgtcaagtatttatttatattttttctaccttttccactactttatcactaaacagggaaaaatatatattttcaaatgttccgctacctgtctgaaacatatccgaaccgtacttgctccgtacattcttcggtcaaaagtacttctacacggagaaagtacggctttggtacggagcaagtgtatccctggtatggtacagacaaatacttttttgttgtactaagctatgaatctgaaaataaacccgtaaatttgcaccgtttaataaagtatataactaagtatcaaccataaaataacgaaagaaaaccattatggagtacaatttcagggagattgaaaagaagtggcagaaaaggtgggtggaagagaaaacctaccaagtgaaggaagatgagacgaagcagaagtactatgtactaaacatgttcccctacccctccggtgcgggcctacacgtaggacacccgctgggatacattgcttcggacatttatgctcgttacaaacgactgcagggcttcaatgtactaaatcccatgggatatgatgcttacggacttcccgccgaacaatatgctatacaaacgggacaacatcctgcaattactacgatcaacaatatcgaccgctaccgtgagcagttggataagataggtttctgttttgactggagccgcgaaatacgtacctgcgaaccggagtattatcattggacgcaatgggcattccagaagatgttcaacagctattattgcaatgatgagaaacaggctcgccctatcgaagaactgatacaggccttcgaacaaataggtaccaacggcatgaatgtggcttgtggcgaagaactcagcttcactgccgaagaatggaaagccaagagcgagaaagagaaacaggaaatcctgatgaactatcgcatcgcctatctgggtgaaacgatggtaaactggtgtgcccaattgggtacggttctggccaacgatgaagtgatagatggtgtatccgaacgcggaggtttccccgtagttcagaagaagatgcgtcaatggtgtcttcgcgtttctgcctattcacaacgcttgttggacggactggataccatcgactggacagattctctgaaagaaactcaaagaaactggatcggtcgcagcgaaggtgccgaagtacagttcaaagtaaaagacagcgatctggaatttaccatcttcaccactcgtgcagatacgatgttcggtgttactttcatggtgttggcgccggaaagcgaattagtagcccagttgactactcctgaacaaaaggatgaagttaacgcttatctggaacgcacaaagaaacgtaccgagcgtgatcgtattacagaccgcagcgtgacgggtgtattctccggaagttatgccattaatcctttcacaggtgaggcagtgcccatctggattagcgactatgtacttgccggttatggtacaggtgccatcatggctgtacctgcacacgatagtcgtgactatgctttcgccaaacatttcggattggagatccgtccgttggtagaaggttgtgatgtcagcgaagaaagctttgatgccaaagaaggtatcgtttgcaactctccaatagttaacaagggaacaagggaacaaggagacaaggcaaattctaatcaacttgtcaactcgtcaacttgtcaactgaatttgaacggactgaccatcaaagaagctatcgaaaaaaccaagaactacgtaaaagaacataatctgggacgcgtaaaggtgaattatcgtcttcgtgacgctatcttctcccgtcagcgctactggggcgaaccgttcccggtttactacaaggatggaatgccttatatgatcgacgaaaatagtttgccgcttgaattgccggaagttgccaaattccttcctaccgaaaccggagaaccaccgttgggacacgctaccaaatgggcttgggacactgtaaacaaatgtgtggtagagaatgaaaagatagataacgtcaccgtattccctcttgaactgaatactatgccgggctttgcaggttccagcgcttactatctgcgctatatggacccgcataacaataaaacattggttgataagaaaatagatgaatattggagaagtgtcgacctctatgtaggtggtacggaacatgctacaggacacttgatttattcacgtttctggaataaattcctgcacgatgtaggagtatctatcgtagaagaaccgttccagaagttggttaatcaaggtatgatacagggacggagtaacttcgtttaccgtatcaaagacagcaataagttcgtttccctgaatctgaaggatcagtacgacactaccccactccatgtggatgtaaatatcgtatccaatgatattctggatcttgaagctttcaaagcatggcgtcctgaatttgccaacgctgagtttatcttggaagatggtaaatacatctgcggctgggctgtggagaaaatgagtaaatccatgttcaacgtcgttaatcccgatatgattgttgagaaatacggtgcggatacattgcgtatgtacgagatgttcctcggtccggtagagcaatccaaaccttgggatacgaacggtatcgatggtgtataccgcttcatcaagaagttctggtcactgttctacgaccgtaacggcagttatatagtgacggatgaacctgcaaccaaagaagaactgaaatctttgcataaactgattaagaaagtaacgggtgatattgaacagttctcttacaatacttccgtcagtgctttcatgatctgcgtaaacgagttattcagtttgaaatgcagcaagaaagaaatattgaatcaactggttattgtattggctcctttcgctccgcacgtatgtgaagagttgtgggatacactgggccatgcagactcagtttgcgatgccaagtggcctgcttacaacgaagaatacctggtggaagatacaatcaactacaccatatctttcaatggtaaggcacgcttcaatatggaattccctgctgacgaaacatcagaagccattcaaagcaccgtattggcagacgaacgttcggctaaatggatggaaggcaaatcagtagtgaaagtgattgtcgtcccgaagaagatcgtaaacattgttattaaataaattagttacgagctacgggctataagctacaagtagagagagagaaggtaacttgactcgctcccttgtagctcgtaacttgtaattcgtagttaatatcttgtaactgattaatatgcaaatcacaaaaccaaccaaagccgaaatgatgagagagttgcgagactatatcttcatcactgtcggtcttatcagttatgccttgggatgggcgttgtttctgattccttatcagataacgacaggaggaactacgggtatcggtgcaatcatctattacgccacggactttcctattcaatggtcatacttcatcatcaatgctgtcttaatgacatttgccattaaaatactgggtcctaaattcagtattaaaaccacgttcgccatcttcgggctgacattctttttatggtttttccaaatgcttgtgaatggtcccgacaatacgccaccgcttatactgggaccggggcaggatttcatggcttgtatgataggtgccgtcatgtgcggtgcaggcctaggaatcgtattcaattgcaacggaagcacgggaggaacggatattattgccgctatcatacataagtataaagacgtcacactggggcgtatggttatgctttgcgatgtgattatcatcagttcctgttacttcgtattccatgactggagacgcgtgatatttggttttgtaactttgtttgttatcggttttgtattagactatattgtgaacagtgcccgccagtccgtgcaattcttcatcttctccaaagagtatgaaaagattgccgaccgcattacgaaggaaacacatcgcggtgtaactgttctggacggtataggatggtacagtaaacacaatgtaaaagtactcgttgtattagcttataagcgccagtcaattgatattttccgtttggtgaaagacattgacccgaacgcatttatctctcaaagttccgttatcggagtctatggagaaggttttgaccgactgaaagtgaaataagaaccaatcaacatatgaaacataaattcgtatttgccacaaacaatgcacacaaattgaaagaagtaaccgctattttaggtaacagaatagaacttcttagtctgaaagacattcattgctatacggacatacctgaaactgccgatactttggaaggaaacgctttactgaaagcacagtacatttatgaaaattaccagatggattgttttgctgatgataccggtctggaagtagaagctttaaacggagaaccgggagtttactcggcacgctatgccggagacggacataatgcagaagcaaatatgctgaaactgctgcatgccatggaaggaatagagaaccgaaaagcgcaattccgcactgcatttgcactgattattgacggaaaagagcatttgtttgaaggtgtaatcaaaggagaaatcatcaaaaccagaagaggaaactcaggtttcggatatgatcctatatttgttcccgaaggatatacgcagacttttgcagagatgggcaacgaactgaaaaacaaaatcagccaccgtgccatagctacaaacaaactttgcaaattccttaatagcatacaataaacccgtaaatatagagttattagtttgtaagtgtgttgcttacaaactaatataactctgattttatgagatttcaatatatatttcttctctgcttaatctaccttctgcctgcctattcgcaaaatgcaataggagagtggcaaacttacctttcttatcataatcctacccgcagtgaagtcattggaagtaaactcttcatccttgccaatggtgatttatatacttatgataaagaagataccagcatacgaacttattcaaaatcctttccgctaagcgatacggaaatatcttatattgcttaccagtcagcctataaatcattggtcattatttattccaatgcgaatatagacctgttggtgaatgaggaggatatctataaccttcccgattataaaaacaagaatatgacgcaggataagacggtcaaccacgcttgtttttataaggaatacacctatttatccactgcgtcgggtattctttgtatcaatctgaaaaagcgagaaatcagcaattactatcctctgaataaaaacgttctggcatgtaatgtatcggataatcatctttatgccgctacctccgaaggattgtttgcagggttattgacagataatctactggatattaagaactggaagaaagtgtcggatgatacctctgaattcctctcacaataccacgatattcctttcaaaggagaagtacccgaaaatattactccgaatagtcctgtacggaactatccgtattatatgaattttgctggagaacgattgctgattaccggaggaggacatatagccaacagacttgacaggcccggaaccattatgacctttgaaaataatacctggaacagttttcaggaagaaggcatcagtgaacaaaccaaacatcgatacgatgatataaactgtattgtgcaggatcctaaagacgctgctcatcattttgcagcatcggcaggagaagggatttacgaatttaaagatgggaagttcataaactggtatagtatgcataacagtccgttggaaagtgctgtacctaatgaaccttgggcagatagttatgtacgcgtgaacggactgatttatgacaaagaaaataacctttggatggtgagttgcgagacacaacatgcagtgagtgtattgatgaaaaatggtgactgggcaagtcttcattatccggaaatagtaaaggcaagtaatttcggacggactatctttgataaaagaggttggctgtgggccacttcttcgcgtatagagtcgggaggattgttctgcttgaattataacggcactatagcggatacttcggacgaccaacacaggttcattacccggtttacgaatcaggacggagcccttttagaacagttggcagtttattgcattgccgaggataaagagggagttatctggatcggtactaacaaaggtcctttggtactgaacaatccttcccgctatttcaatgataacttctattgtacacagattaaagttccgcgtaatgatgacagcgggttggctgatttcttactggtgaacgaagcgattaatgccattgcaatagatggtgccaacagaaagtggataggtacggcatccaatggaatttacctgataagtgcggatggaatggaaacgattcatcactttacggaagaaaacagtccgctgctttccaatagcatcgtatctattgccatacatccccgtaccggcgaagtcttcatcggaacaagcaaggggctcgtttcttaccaaagtgacgctacagaggctgaaaacagctttaaagagagcaatgtacgtgcttatcctaatccggtacgtccggactacagcggagtgattactgttacgggaatggtttacgacagtgatgtgaagattgtagatactgccggacatcttatttaccaaggtacttccctgggaggacagttcacctgggacggaagaaataaacaaggtaggagagtggccacaggaatatatatggtacttgccgcagacagtgaaggaaaagaggggattgttacaaaaattgcatttataagaggagaataagggtgataaagtgatatcaccctaccactttatcaaagccccagttttgccgaaatctccagcatcctcttgataggcttcactgctttctcagcaatttcaggatctactgttatttccggagattcgtctttcagacaattataaagcttttccagcgtatttaatctcatgaagctacattcattgcaggcacaggtactatcgttaggaggagccggaataaacgtcgtttgcggacatttcttctgcatttcatgaaggatgcccgattcagtagcaacaatatactctttctcgggatgattcactgcatacttcaacaatgctgcggttgaacctaccacatcagccaacttcaaaaccacactcttacattcgggatgtgccaagaccactgcatcgggatgctgcgcttttaattcaacaatcttttcaaccgagaattgttcgtgtacatggcatgcgccgtcccataataacatattgcgccccgtgatagagttaatataattccccaggtttctgtcaggaccaaagattattttctcatctttggggaaactttccacaatctgcttcgcattggtggaagttaccacaacatccgtcactgctttcacggcagctgtcgtattcacgtaagatatcaccgtatatccgggatgctctttgacaaactgactgaacttgtccgccggacaactgtccgccaacgaacaaccggctgccatatcaggaaccagcactttcttattcggacaaagcaccttggccgtttcacccataaagtgaacaccacacatcacaatgatatccgcttccgttttggctgcccattgggccaatgccagactatcgccgacgtaatcggctatatcctgtatttctcccttctggtaatagtgccccagaataatcgcgttcttctcctttttaagttgcttgatagcttctatgagattattcataattatattttttatttctctttctaatttaaaaatcctttgatggtgatgataggctgttaatagtgtcgacaagtaaatacgatttttcttgtctatgaagttattagtatgagataaaactttatccgtacgttatcaacgggcaaataaaaggtatatctcttgataataagccatctataaaactctttcaacaccttgttgataaagtgcaaagttaataactttatggttataaaccggtgtaataggactgaaaaatgtgtttatataacctcggaaagtttctcttaacttttttggaatgttcattccggtgggtgcatatacgttgttttgaatattgcaagaattatttttgaatttctttccctactcttttgacagcttttcaacggttattaacagggatgtgaacggaaagaagtatctttgcaacaggaataaaaagataacgtataagtacgttgtttgttctacacttgtgtggcttgtctgtaatgcttgtgttgtataaatgaaacacaagcgtggtgcaaataaaacacttgtgttaaacaagtctttgtaaatcaatctattaataaaagccatttaaagagtatagttgttatgcgtaaactgaaaataacagaactgaatcgtattagtatagaggagtttaaggaagctgagaagctgcccctggtggtggtattggataatatccgcagtcttcataacattggttctgtatttcgtacttcggatgctttccgggtggaatgtatttacctgtgtggcattacagctactccgccccatcctgagatgcataaaacagctttaggtgctgaattcactgtcgactggaagtatgttgataactgtgttgaagctgttgataaccttaaaaaggaaggatatactgtttattccgtagagcaggcggaaggcagtatcatgctggatgagctgtctttagaccgtactaagaagtatgcagtagttatgggcaatgaggtgaaaggagttcagcaggaggttattgaccattccgatggatgtattgagataccccaatatggtacgaaacactcattgaacgtatctgtaactgccggtatcattatctgggatttattcaagaaactgaaataacaagatgttgataagttgtttgaaccctgttcaaacagtggttattatgtccttatcaatagagaaatgaacaatggttcatagaagttttcaacatagataagtgtttgaaatacatggctttctataatgattgtttttcattactaacaatgttcttaacatcatatcaacaggagggttcaaactatgaaaaaggttttattaattcttttattctgtattttccatagctggaatggtaaagcgcaagcagacttttattcgttgcaaccattgggcgacaggtatatttacgactctgaatattttgatgattcacgcgaactacaaatatatcggagtggggtagatgctatgttgaagagtgattcattgttgactatctatgtattcgacgctcaatatccgcctactttcaatttgttttgttccacctttgaattgttgtatccgggtgttccctgtataatcgttggtatttcgaatcctaacaggcagagtgaattaacccctccttatacagatgaagaatcggtaaaggggtatgatgatcctgggaagggggattctttattgttatctctggaaaaggaaattattccttttataaagagcagatataatacgggttcgcggaatatactggtaggacattcgttaggtggcacgtttgtgacgtatgctttacttagcaatcccggtttgttccaatgtattctgtctgtatctcctaactatatgtatagcaagaagatgatgattgataaactttcagaatttactaaagagtacaaaggggataaccaactttatatgtatctggcaagcgggaagaaggataaaatagaagagtcatttaagcctgccacagaggaggcaataaagatattatccacttgtccgaagattgttttgaactatgattctttgaatatagaaaaacacagtcatacgatctttgaaggttattacaggggactgttgggattgaaaaattacataaataaggaataggatatttctattctaaagctgtccgctttctaccaacagaataacccgttcggtaagcgcatcatctccagtgggatcatattgttttttcagactggcaccgaacagtgcggcgaaagtctgatagaaacctgctttaaaaggtcccatgaaggcttttaccagttcgtaacccgtggaattggtttggcggtccactaacttgattaataactttccttgagagaaagaaagctttttcatgcgtggagtatattgttctttcagacttttctctactgctttcatgtgtttctgacggctcttctcatcgggtaaagtcatcatatattcgtaagtttcaataactgcacggttgatttctttggagataggcaataccttctttacgttatataccagtcggttatattcattcaactgtttcttgttcttgaatttgagaggtttgaagatataaacggtgggtatctttatatacgggatagtgtctccttcgtaaacgcacataggaaccaggtatccttcggttttcgtttcctgcgcctgacatagggaagttccgaacagaaggaagactacgatgatgaatatgttcagtcgtgcgttcatgccacaaaattaagtgtttatctttatatttggtccgattgtcgatgttttccttgccgtgttaacttatttatggtaatttcgcgacaattaaacttatttacacgaatgaaattactcaagttgggagtttttctgagtatgctgctgatgactcctgtacttgaagctcaaaatacaaatgtgtccttgtgggaagagaatatagagcaactctctatggatgaagaagaaaagaactgggaagatgaacttgaagagctttccaatcgcctgcaggaacctgttaatatcaatgttactactaaacgtgaattagagcaatttccttttctttcggacattcagattgaaaatatcttggcttatgtgtatatacacgggcagatgcaaaccatttatgaactgcaattggtggaagagatggataagcataccatcgacctgctgctcccttttgtttgtgtacatcctgtgcccgaaaagataggttttccccggttgaaaagtctgttgaaatatggtaaacaggaggtattaacccggctggatgtacctttctatacccgtaaaggttatcagaagaattatctggggcctgcaatgtatcactctctaagatatgggtatcgctacggagactatcttcaaatgggaattacggccgaaaaggatgcaggagaacctttctttgccctgcataatgaaaaaggatatgattattattctatctactttctgcttcgtaatctgggtaagttgaaaacattggcattgggaaattacagattaagtttcggacaaggcttagtagtcagcactgatttccgtttagggaaaacttattctctctcaacggtggataaccgtagtggtggcatccggaagcacagttcaacggatgaatataattatttcaggggtgctgcggcaacagtggaggttatccctgcacttcagttatccggtttttattcacatcgttctatggatggagtcatagaggggaatgaaattacctctatttataaaaccggattgcatcgtacggagaaggaagcggataaagtaaatgctttcactttacagttgatgggtgggaatattacctatgaaaagaacaatctaaaagtaggaataacaggcatttactactttttcaaccgtagttatcaaccggtgttaagaacctatgccaagtataatttgcaagggaattactttcataatgtgggtgtagattataaatatcgctggaatcgatttactctgacaggtgaagcagctatgggcaaacaaggttattcactgttgaatcaattgaaatataatatattaaccggttatcaactgttgattgttcatagatattatagtcatgattactgggcaatgtttgcacgttcgtttggtgaaagtagtacaccgcaaaatgaaaatggctggtatctggctgccgaagcatcgcctttggcacattggaaattcttcgcttctctggatttgttttcttttccctggtggaaataccgcatcagtaaaccgtcgcaaggtgtggatggcatgtttcagtcagtctattctcctaagcgaaatttatctatgtatgttaactatcgctataagcgaaaagagagagatgtagcggggacggatggaaaagttatccttcctacttaccagcatcgccttcgttaccgtctgacttattcacctgataatctacagttacgaacaacggtggattataatcattttcattcccgggggcaggagggaagccagggatatcagtttacacaatcctgttcgtatgctttttcttttcccataaagatatctgtgcagggtacttatttccatacggatgattacgattcccgtatttatgcttccgaaaaaggtctgctttacaccttctatacaccttcgttttatggacaaggatttcgcttttctgcctgtgcccggtatgatgtgaacaaagtttttatgttccttgttaaattcgggcagactatctacgaagaccgtgagaatattggttcgggtaacgacctgatacaaggaaacaaaaaagccgacttacaaatgcagcttcgtataaagatttagttaactttgccgttataaacgctgaaaatactgtatccggtttttacagtaattcagtaatttgaatcgtcaattgtcaaatcgtaaataaaatgactgtaatttatccgtctcccattttcggtcctgttcattcccgccgtttgggagtatccttagggattaacttattgccggaagatggtaaggtgtgttcattcgactgcatttattgtgaatgcggtttcaatgcagaccatcgtcccaagaaagcattgcctacccgcgaagaggttcgcaatgcccttgaagccagattgcaggatatgcaacagaatggacctcaaccggatgtattgacctttgccggaaacggtgaacctacagctcatccgcatttccctgaaatcatagaagatacgttgatgcttcgtgataagtatttcccgaatgccaaagtcagtgtattgagtaattctacctttattcaccgccctgcggtgtttgatgcgctgaagaagatagataacaacatattgaaactcgatacggtagacgaggattatattcatactgtggatcgtcctacagggcattattctgtgggcgaaatcatagaacatatgaaagcctttcaaggcaactgtattattcagaccatgttcatgaaaggcagttatcaggggaaagacgtggataatacttcggataagtacgttcttccgtggctggaggttgtgaaaaagataaaaccccgtcaggtgatgatttatactatcgatcgtgaaacgcctgaccatgatttatgtaaggctactcatgaggaactggaccgcattgctgctttgattaaagaagcaggaatatcggtaagtgtttcttattaagcggtttacaggatctatatatccaacgtattgggtctatatatccaatgtgtccgatctatatatccagcgcgtcccatctatatatccaatacgttgggtatatagatcctacaaacgggaaataatggagtgataagagcatagtaaagcaactgagtagtttcgattatatatgaattttctaataaaagtatatgaattttcgattataatcgaaactattcttatttttgtgaaaaacttaagctatggacgataaatggagtgcactggaaaagtataatctttggaatggaaattcctataaattagggttactacgtacatcttacattaataagattcatgcttttgtggggaataaattggtaaaagtacttgtaggtcaacgtcgttccggcaaaagctatattttgaggcaaatagcttccggtttgatttctgacttaggtgttcaccctaataatattctgtatatcaataaggaatatttggaatttgatttcatagacaattatcaggagttagaaaagctatatcaactttatcgtgaaaaacttaatcctcaaggaaaagtttatttattcttcgatgaaatacaaaatgtagatggttgggaacgatttgtcaattctcattctcaggattttgtggaagaatgtgagttgtttatcagcggttcaaactcaaggatgctttccagtgaactggccactttgctttccggtcgttacgttgaatttcatatttttccatataattatatggaatatattcaagtggcgaatacggtgggaggacgttcctcttatttatcttatttacaacgtggagggttaccggaattatataatttgcctgatactgaatctcagaagcaatatgttgcttctgtcaaagataccgtattattgcgtgatatagtgaaacgtaaacctgttcgtgatgtcaggcttctggatgatgtttttatttatttggtgaataatgcatctaatttattttcgattcagaatgtaatcaatttctttaaatcgaagaaccgtaaagtatcatacgatacgttatcgaattacttaagttatatagaagaagcctttttggcttataaaacagagcgttacaacattaaaggaaaagaagttctggcgggtaattgcaaatattatctgaatgatttggcatttaagaactttttatatccgggctttgcatacggtgtaggatatttgttggaaaatgcggtatatatcgagcttcgcaggtttggttttcaagtttatgtgggtactattcgtgataaagaggtcgattttgtggctatgaaagacgaccgtattatttatattcaggttgcttacatgatggaaacggaagaaacaatggagcgtgaatatgcttctttattatcaattactgatagttatgagaagtatgttgtttcaatggatgaagttcaatttccttcaagagaaggtatacgtcatgtacaagcatggaatttatcagaaatattaaagtgaataattttatagtatgtatacaatgaaacctattgcaattaaagacctttcagataacttctttgaagttatcggtaaagaatggatgctggtgacggcaggtaataaagatcatttcaatacgatgactgccagttggggcggtataggcttcctatggaacaaaccggtggtctatgtctttatccgtccggaacgttacacgtttgagtttattgagaagagtgaatacttcacgctctcttttctgggagaagagaacagagctatccataagatatgtggaagcaaatcgggtagggaagtagacaaggtaaaagagacgggactgaaaccggttattactgaaaaaggaaatattctttttgaacaaggacgtctcagtctggaatgccgtaagctttatacggatgtaatgaaagaagattgtttcatcgatccaagtgtttgtaagcaatggtatggtggcgctcatggcggtttgcatcatatttatgtggcagagattaccggagcatggatgagagaataaataatttttaataatataaaggagggaatgaaaaaatcattccctcctttatattattactttgttttactcatctaataattctttcgatctttccaatgctacattaatgttcgggcagatattcttctcgcccaacagttcgtagaagccggatttttccaatgctttgtgcactttttcattcacgccggaaagtacgatagtggttttttcgcgttgcgccatttggcaaaggctagtcaggttgtggatacctgtggaatcgatgaagggtactttcctcatacgtataatgcgcactttgggacggtctcccagtctggacatgatttcctcgaacttagtagcaataccgaagaagtaagggccatttatctcatacacttccacgcctttgggaatggacaggttttcttcatcttctttgctgttagattcttcattcagattaatctcatctttgataacagaaatttcagtggtttccatcacacgatgcataaagagtacacaagctatgacaagacccacttcaatagcaatggttaagtcgaaaataactgtcaggaagaaggtaatcagcaatacggtgacgtctgatttcggattcttcagcagtgccttgaatgtgcgccagccactcatattataggaaacaatcaccagcacacctgccagacaagccatcggaatgtattgtgccagaggcattaggaacagaagaataagtaatagtaccactgcatgtaccatacctgcaacaggggttttaccaccattgtttatatttgccattgtacgtgcaatggcaccggtggcaggaataccaccaaacaaaggtgttattaggttggcagctccttgtgctatcaattccgtattggaatcatgcttatcgccgataacaccatccgctaccgtagcggaaagcagcgattctatggctcctaataccgcaatggtaatggctacaggaaataagtcctgaatagcctcccagtttagtgaaggcattactgcatccggcagttccgccttgatactgaagcggtcgccaatggtatctatgcagttgattccggcataagtcttcatcagatataccgctaccgttactacaataatggcaatcagcgaccccggtatcttctttgagaatttcggggttatggcgataattgcaatacttacgatgctgacaattgtattccaccagttgatagtatcgaaatgctggaaatagatcatccatttcccgacaaaatctccgggaaccttttcaccaccgaaattaagtccgaagatatcggctatctgcgtggtgaagatagtgacggcaataccactggtaaatcccacgataataggataggggataaacttgattacagcacccagcttgaatatccctaacaggataagaatgactcctgccatcagcgtggcaacaatcagtcccgcttctccatattgctggatgatgccatagataatgacgataaaagctcccgtgggaccaccgatctgtactttgctacctcccaacatggagataatgaatccggcaatgattgccgtgataatacctttttcgggtgatacaccggatgcaataccgaacgcaatggcaagcgggagagcaacgatacctactatgataccggccatcaggtctgccatgaataattctttcgagtagttcttcaaagccgtgaatagctttggtctgaattcgaacgctttcatagataatctgtactttttgtgaaacgaggtgcaaaattagacaaaataatgcatatattggttgattgctttcaaatatattatatttgcagcagctaactgtaatattatgaaatcacgattgcttatattctttctttttctttctatttttaatatatatgcttcggatgtgaagttttataatattaatgcgatgtatggaatttccatgcgggaaatggcctctgtttgtaaagatgggaatggttttatctgggcttcctctaaaacgggtatattgagaattacggaaagtgattatcgcatttatcagcttccttataaaacagccaatatcataaatgtcaaattggcctataataattcatttttaatagcatatacgaataatgggcaattttttcattataatgaactgtatgaccggtttgatttatttctggatcttagaatatctttcaataatacttttttaagtgtaggtaaagttgttattgatgatgaacaggctctctggattcctacgtccgggggattgtgcaaatataaaaatggaatatttacccaaataggtgaggcgccaattcgaacacagtgcataacgtcttatgatcagacacatctgcttgtagccagtcaagacagtattagattattaaatacaaatacgttgaaacaaaaaagtatatgtggaatagaagatatgtttcagataaatactcttttttatgatcataaaagagaggttgtatggataggaacttccactgatggtcttttctatctggacatgaaaaagaaaacgttattgccattttctaatttcccaaagcaacctatcgcagtgataacggaaagttcggattcaacactgttagtcggaatcgacgggcagggagtatgggaattggataaggataaaaaaaaggttctgaatattttgaaagaagatattgataatcctttctctcttcgtggagatggggtttatgacatcttttgcgacggtcagcagagggtgtgggtcactacctatactggtgggctttctttcttcgactggaaatctcccttgattaatcaaattacccatcaggttaataatccgaattctttagggaatgataatgtaaacaagatattggaagatagcaaaggggatatctggtttgctacaaataatgggataagcaggtggagagtcgccactaatgaatgggatacttattatcagaataaacaggaacaggcacaggtttttctggctttatgtgaagatgacgaaggaaatatctgggcaggttcgttctcatccgggttttatgttttagatcggaataccggaaaagaattggttcattatccgcggaatacatcggatttgaaatctgacggtaaattcataatgaatatatataaggacagtgagggtgatatctggattggaggtatccaagatgtaatatgttatttaacaaaagaaaagcgttttcatacgtatggtgcacagcccatgcgtatgtttatggagttttctccgggaaaaatgctgttggcctgtacttattctgtgcttttgctagacaaggaaacagggaaaatcactttcttaccggaatgtcttgcacaggatattttagtaatgggagatgatatttgggtggctacttccggagacggattgctgcaccataactacacgactcgtgaaactcataaaataacagtggaatccggattgccatctaactatgtgaatagtgtcatgtatgataatggatatttatggttaggaacggaaaatggattgtgccgctataatcctgccgacagcacggtgcatacttattattccactttagctctctccagtgcttcgttcaatgtgaatgccagctgcaaattacgtaatggcgaattgatgtggggtacaaataacggggcggtaatgtttgatcccgataaattatatcatacccagctcaacggggagatttatttccagaatatcactatttccggcagttctatcagagaaaatcaggatttgttgcgtggaattccggtgaataagcaaacagatatttcattcaaatatgatcagaatactttgacgcttgaggtattgcctattggcgtttcttccaaagaaataaaattttcatggaaaatggaagggcttgatacagaatggtcacatccttccagtcagcagataatcacttataccaatattcctaatgggaatttccggcttaaagtaagaatgtacaataattcactttctcagatagtcgatgaacgtacattggacatacacgttattccgctttactggcagacgtggtggttccgtctggtggtattcattattataatgagcattacattctttgtgcttaaattctatataaaccgtttgaaacagcgtcatgctgaagataaaatccgttttttcacaaatacggctcatgatcttcgtacatcgataacgttgataaacgcgcctattcaggaattgaataaagagaaagaattatcagacaaagggcattattatctgaatctggctacggaacagtctgaacgtttatctaatgttgcaacccaactcctggattttcagaaagtggatatggggaaaggacaactgtttctggtaatggttgatattgttaaattggtgtacaggcggaaaacaatgttcaagtctacggcgggaagaaagaatgttatattggagtttgtctctaacagggaatcttatatgtcagctgtcgatgagttgaaaatagagaaagtcgttgataacttgatatctaatgctataaagtattctcatacgaatggtagggtggaacttacattgaattgtaatgagtactattggagcttggaggtgagagattatggattgggtatctcggataatgctcagaagaagctgttcaaagagttttataggggagataataaggttaattcacgcatggtaggttccgggataggcctgttgttggtgaagaattacgttttgatgcatgagggaaaagtctcacttgaaagtaaggagaatgaaggttctttattcaaaataaacatcccttataaagaagtggttgaggttgcacctgctgaacatgaagagccggggaatatcacatctgctgatggtccgtctgatcaatcggaatataaaaaggaagatgataagtccgaaaagaagaaatctatattaatcgtagatgataataaagatttgcggaacttcctgaagtgttcttttgaaaatcaatataacatcttagaggctggcaatggcaatgaagcatgggaattacttcaaaaggaatctcccgaattgattatttcggatgtgatgatgcctgatatggatggctttgagttatgtaaattgatcaaatctacttttgaaacttcgcatattccggtgattctgctaacttcactttgtgataaaagtgaccagttggaaggtttaggcttgggagcagaggattatatcacgaaacctttcgatatatcacttttggagcaacgaataaagtcccttatgcggaaccgggagatcgtcagagagaaagctttgaaattgataaagtcggataatgatgagcaacaggttattttgaacaatgagcttaacgatcattttgtgaaaaaagcagtggaagtgattcataataatatgcaaaatctagattttgataaggaaagctttgctatggaaatgcatgtgagcggttcgttattgtataaaaaaataaaagcactgacaggtcaatcacctattgactttattaaatccattcgtttaaaccgagctttggaattactccaatctcataagtacactatcacggaagttagcgaactttgtggttattccagtatcagttactttagtacggtgtttaaaaagtactttggcaagtctcctacagaggtctaatttacttctttttcctgttttttatcgtttgtagcatagattatctaatatctaaaattatatatctaatatctaaaagtgtattgggtacatttctgtagctttgtatatcgatgtacggaatgtatgtcgatggagttattgttatgttaaatctaatcaagttaatcttatgaaatgtatgtatgatgatgacggttaagtcaacgattatgtaaagactgtaaaatcagagataaccgtagtgatgcatatcactttcggtaatctgtaatgaatttcatgtggctttgacatttaaaggggggctggtgtcaatggctgccgttatgaatgaaaaacatagaaccccattacttatatattatgaagaacaacaagctttattttgtttttcttttcttaagtattttgttcgcaagttgcaatggcgaagaagtaattgagaaatggcctgaaataggcaactattatgattcgagcaagcctattgagttaaaatccatgtcacccgactggggaagaatcaacgattcttttattatcaaaggaaactttccggttgacacgaccggaaaagtcaaagttttctttgccgacaaggaagctgttatcgtaaacaacaacggaaatgaattgtatgggcttatccccaagcagtttcccggctataacgagataacattggaagtggatggcaaaaggtatacatctgataatgtgaagtttaagtactatcagactcaatctgtgaaaacaatattgggaaaatttggtgaaaatacctggacatcgtcaaatgattgtaaaatagatgaattccgaatggatgattcttcaggaattgtagctgttgcaggacaaaagagtgataatttcattttctatgcaggagtatggggcgatcgtacttattttgtgtcattagaggataatatggtgatgcgtctgacttctattggttttatgggttctgttgcagttgataattcaagagaaaaagtgagcatcatgcctcgtgatggaggtgagttatacacagccacccgtggggatggatggactataaactctcttggtctcaaaataccttcttcaaacagttgcgtgggggtattgacttatgccgaggatgaccgctatgtgtatgcaatgtccgatgatggtctttatgaagtggatttgacagataaaagttatacaaaattagttactccatcagattacccggcttttaatggagtgaatctcggtcagtgggaacattatctgacttacagtaaatatgataagtgcttttttgcctcttatcctgagaataatggcattctgaagatatggaaagatacttcgggtgcatggcaagtggaacgctatgccggcttccaaccgggatggttgaatacaacttttggggatcgattgacggatgccgtattgaaacaaccttgcggaatggcggtgaatagttacggtgaactctatgtatgttgcaaagcgagccattgcattgtgaaaatcaaaggaaggcttgtttctttggtagcgggagttcccgatcggtcaggaagactaaacggattccctacggatgcaatgtttgataatccagtggatattgctttggattcggaggagaacttcttcatttgtgaacgatcttcaaatgcaatccggaaaatgacaattgaataaaagtagaaatcatataaaatgaatcaagatgaagattaaatatatattactgtttctcatggcatgggtaagctctatgagtttggcctatgcgcaacagactgtggtagcttcgggttcggttatggacgagaaaggcgagctcttaatcggagtatcgatttctgtaaaggaagttccttctatgggtgctattacggatattgacggtcgtttcaagatagggggtatcaaagttgggcatacgttggtcatatcctatgtggggtatgatcctcaggagataaagatgaacaagagcaacgagcgcatgcgcgtagtgttgaaggagagttcgaatgtaatggatgaggttgtgattacggcatcgggtaaggtacagaagaagattaatgtgacaggtgccattaccggagttgaggtagctacgctgaaaactcctgccacttccataagcaacatgttgggcggacgcgttccgggcatcatttccgttacacgtagtggagagccgggcaaggatttctccgagttctgggtacgtggtatcagtacctttggtgccggacagggagctttggtgttgattgacggtgtcgaaggcaacttgaatacgcttgatcccgaagacattgagagtttctctatcttgaaggatgcctcttctacggcggtttacggtgtacgtggtgccaacggtgtggtattggtaagtaccaagaagggtaaagccggaaaactgaatttgcaggtaaaggcaaatgccggtatctcttattctcctcgaatgcccaaatatgtacgtgctgcggaatatgcggcactcgccaacgaagctgccgtgacacgtggacgtattcctgtctattccgatgtggatgtggatttgttcgggaaccacatggaccctgattttcatccggatgtggattggagggatgttatcttgagagattatacctggaaccagcaatacttcctgagtgcgtcgggaggtggtgaagtagctcgctattacatcagtgccggttttacgacaaaagatgccatctttaaacaagataaaggggtaaacaaatacaatacgaacgtaaactacaacaagttcaatttccgtgctaatgtggatgtgaatgtcacttccaccactacgctttcgctgaatgaagagagtgtgattgttactcagaattatccgggatatggaaacgacagtagggtattgtggcaggcacaatccaatctgactccggtgacagtaccgttgatgtacaccacagggcaggcacctggatatggcactgataaatcgaatattagtccgtatgtattgttgaatatgacgggttatcgcaagttctattccaatgataataaaatcacgatgcagctcaatcaggatttgaagatgataactcccggactgagtattgcaggattggtcaacattaattcgataggtgcgagaacccaagttcgcgaaaaaatgccggccatttattatgctcatggttataaacgtgatggaacactcgatttggagaaaatatctgatgcagtggagccctattatacaaattggaatgacactgagcgtagaatttattgggatttccgactgaattacgaccagacatttaataaggtacataaggtgggtgctttggtgaaggccgaatggagcgattatgaagcatcgaaatataatcaattgctgactgctatccctaaacgatataatagttactcaagccgtttctcttattcgtatgatgatacttatatggccgaatttaatatgggttacaccggttcggaggcttttgagaaaggtaagaaatttggttggttccctgctgtttctataggttgggctcccacgcaatatcgcttctggcgtaataaggacaattttatcaattatttcaaaatcagggcttcgtatggtatagtaggtaacgaccggctcacttggaatgactcggtacgttttccctatcttactttgattggttacacaggttccggcagttggaataacggttccggcttgaccgaaacgcaagtgggttccagcaacctgcgctgggaaaaggccaagaaagctgacatcggtattgatgcacgtttcttccacgaacattttgagatgacagtcgatttcttccaggatatacgttccggtatttatcagcaacgccagagtgtaccggaagagatgggacttccgtcattgccttgggccaatgtgggtgaaatgaagagctggggtatggatggacatatctcatatacgcagcctttgggtgacaatgacaaatacctgattgtacgtgccaactacacacagtccatgaacaaaatcaccaatttcgaggaagaccttaagaaatacgattaccaatcagccgtaggatatcaaagtggagttaaccgaggcttgatagctttgggcttgtttaaagaccaggcagatatagataatagtcctcgtcaggattttggcaattacttgccgggtgacatcaagtataaggatgtcaatggcgatggcattgtcaattgggatgatattgtacctttgaagtattcttatgtgcctcagatacagtatggatttgccacagagtttaactggaagaacttcaatgtaagtgtcctgttcgagggagtaagccgcgtgacctattttaaaggtggaaatatgtatcagccattctcgggtagtacagccggtaatgtgattacagattttgccaacccggcaaaccgatggatttcacgtgaaatctcaggcaaccctgccaccgagaatccgaacgccaagtaccctcgtctttattatggaggtagcagtaataatagtcaatcatcttctttttggttgtctgatggtagttacttgcgtctgaagaatgtgcaagtctcttatacactcaagaaccaattcctgaaaaagtttggtctccagaaagcagtaattagtgtgattggagacaatttggcagtttggtctaaagagaagatgctggatcctgcacaagcgggagataatggaacagtctatccggtccagcgagtgtatactttacagcttaatctttcattctaatataacctgacaattatgataaaatttggaaattataaaagagaattcggttttctcggcagaatagccgcaataaccgttattttggtttcaagcattatgttcggttcgtgcgaaaaatacttggacattgaccaatatgtgtacgatcagaccacactggattccattttcctttcccgctccagaacggaagagtatatcaatggagcggctgctcttcttcccgatgaatcaatacttatgaatggttggggagcggcttctacattgcccagtggattgggctcagatgaagcaatcgttccgttcgtaacgaatggaaatgctatactttatgatgaagtgaaagaaacgaactcatggtttaatccgtggcccgagtgctataaaggaatccgtaaggccaacatcgtattggagaatatatccaaaaaccaggagcttaccgagatggaaatgcgtgatttcaagggaagggcttattttctgcgggcttacttctatttctatttggtaagattgtacgggcctgtggttgtacttcccgaccgtcctttcgatacggacgaagatgtagcgtcagtttcattcgagcgttccacttacgatgagtgtgtagagaaaatctgtgccgactttgaagaagcagctaaattgttgcctgcaagtcgtatagatgcattgcagtatatacctaccaagggtgctgctttggcgttcaaagctcgtatgcagctctatgctgccagcccccttttcaatggtaacagttactattccgattggaaagactcagaggggaggaatttcattgcccagacggaagacaaggttaagtggggaaaagctgccgccacgttcaagcggattattgatatgaataagtatgccattcatactgtatccaaaatagtgaatgaaaagggtacaggcacattgcctcttcccgagacggtatctgatgccgacttccctgatggagccggaggtatagacccctataagtcatacaagacgctgtttgatggtacttaccagcctgagttggttaaagaatacatctatttttcaaaaaataatggaaactatattcttgtgacaccttccaaattggggggaatatcttcatttagtgttactttagatatgattgatgaataccggatggctgacggtagaccgtttagtgaagctactcaggcggaaaaatcatggcaggcagtgggacaagataaaacattctcgtcagattatcttctttccggaaacagagctcatcgtgatgatggtcgcgagccgcgtttttatgcggctattggtttcaatgcttgtatctggcctacaacttcccaccgtgacggtttgtcagcaggtaccagaaactatgttaccgactattactacggaggtagtgcatctgatatgaataataatgataacagaaccaggaccggatatacctgccggaaatatgtgcatcaggatgattgtatcttttggaatggagtggtaaaagcgaagacttatccgatattccgctatgccgaagtattgttggggtatgtagaagcgatgaacgaaatggaaggttcgtatacggacgaagatgggcaggtgacggttactcgtgatgtggatcaaatggtgaaatatttcaatcagattcgttatcgtgccggtcaaccgggaatcacaactgccgatgcagccgaccaaagcaggatgcgtgaactaattaagcatgaaaggttgattgagtttgctttcgaaagtcatcgttattgggatttgcgccgttggaaagatgcctatgacgcttacaacaaacccatcagaggattggatgtaagtgctcgcgaatcacaacgcgaacagttctatacagaaagaatctggaatacagaaaaaaccatgaaacgtatgttttccaacaagatgtatctgtggccgcttgacagaaatgtgctgagaaagaacggtaagttggtacagaacccaggatggaattaaaatgaaaacaataaaagctgataatatgaagagaatagcatttttttcgataaccttgctgttggcatgtatggcgggttgcgacaataaaatacctatggaagagaatttatggcccgaaacggtttatctggttggggcaaaagataagattataaatagaaatctgaatataggttatgaaaaagataccatatatgcatcggttgccatcagcggttcgctgcctaccaaggaagatataactgttactgttgaagaatttccttctggtattgaaagttataaccagaaagaacttggttcggatgatataaagtatcgtacgttgacaaatggtatctatagttttccgcaagaaaatgtaattgtgaaaaagggtgaagcctatggcacgtatcctgttcacattgacccatccactttgcatatagattcgctctatatgatggcgtttaaacttagtggaacatctcgttttgaactggctaaagaagatacagtggtgctaatccgtctgaatctgatgaatgactattcagggctttattatatggacggtgtgattaagcctgctgataatccgaaggattccgttatctataagtcgcctcgcacgttgcaagctgtagtcgatggtaacactgtacgtatgtatcatcaaaagaatgaatggtcaaaaggtgctacagactacagacccgattattgctttaatatcaccgtaaatccggataattcagtgactttgaagtcttgggataagtttaaccttgtcagtggtggcggtaagtattaccccgaaatggaagtgtacgatttgtggtatactttcagagaggatggtatgttgaagaaaacgcggggatttgtgtataaagagcgtaagaacgatgatgaagtacgcaagataaacgactggatggaagaaaatagaaagtacgattattagaaaggtgtttttaaggtaaaaaacagattgtgacttttttattatcattagtttaagaatggtgcttcgtgagaaacaccattctataagtaaatattgtcaaatttttaaagcagaaccattatgaagcatttattttattgtttgtttctgatgctattatgtatcggatgtaaaggagaagatgatccgatcatagaagaaaaaaatgacccttcgtctgcaacgacaagggggccgtcgggttctcttgatttatcattgttagggaatgttgtttctatttcttggaatgagccatttggtaagtatgttggtatcgaagtaggagtatctactgagtctggtatgtcattgggttcattttcaagtagtaacgactctggaagtgagaagttttttgtgtcctctattgcatcatacagtggacctgtgatagcgacagtaagaggtcgttcttctaatggatatgttggtcaaccaataactatttcactcggcattatgaatgatcctgctgctccaccaaattgtagtcatggatataatccacgatatccagtattaagtataggcgtagacttggagcataatttctatttttcgagaggagagtttcctaaaagagggttattgttatatatcttgcatgttcagagtttcgatcattatgaatcccttccttattacccttatacccctaaccctgtatatgatgttgaagatattacgaattgggttgatctcccggttcttacttcatctatgtccgaggtaataaaaattagccatccacaattagatagattttgggatcgtccagatgcgactttcactttagatattcgtctttacgatggagggtgtcccaaattgtctcctggtaatggttcatcattaccagcatgtacaaactattgtgtgtataaaacaactaatttagagcctttgagccaaatagtccgttctgtaaaaatgagtcaagttttggatggagtagtttattatccagattctccaatgcctacttactaataagtacttgtgaaatctttccattgctttcttccttgttttccattggaaaacaaggaagaaagcaatctgttactctataatgctgataatgagaaagtattcgtgttaatctgtgtattctgtggtgaattaataattaaaaagaaaaaataatgaagaacattgcgaacagttctgtcaaatacatggtatggttgtgctgcctgatactgtctcccagcctttgggcagatggtaccgctccccagtctgtaccgacagatacccttgaaaatctgttcagagaagaaatgtcgcatttccctcaggaaaagctttaccttcagacagaccgtggcatttacatgtccggtgaaaccctttggttcagggcacatttagtagatgctcttatgttaaagcaagctaatgccagtcgatatgtatatgtagagttggtgaatccgttgggcaacttggtggagagagtgaaaataagaccggactctttggggtgtttttacggacatattccattgggtgaggacctgccggaaggcaactattctctcagagcctacacttggttcatgcagaatataggtgaagagtactttccccataaactgatttatatatccgatcccgtatctgaagcgatatctccggaaatcagttattctgctgaaaacaacgacgttcatgcggaaatacattttctcagtaaaccggacaaccgatccgtcactcctacacaagccattcttttccccgatggagacagggacaaagaaggaaaagtcttatcattggaaggggaaaatatccattacactttcaagaagaaggagattcctgcttcgcgcacgtttttgttacagacagtgtatgacggaaagatttccaatcgctatttcagaatccccgaattgagtaaaacctttgatgtggctttcttccccgaaggaggtcatgcagctcaatccaccacaatcaaaatggcatttaaggccatcgatgcagatggtttgtctacagaggtagaaggtcaagtatttgacgaagaaggtcaggtatgtgccgatttcaaaagccagcatttgggtatggggagttttcggatgtattatgttcccggaaaaaagtatcatgccgtttgtagtgacggaacaggtgtttccaagcgttttgatttgcccgaaccttctccggatgctatctccctgaatacactttggtctaaagattatttgcgggtaagtctttccaaatcacccgataccccattgggcactttgctgacactggtggcgcatttgcggggcatcgttctgtatgcacaaccctgggatgataaacaaaattatgttgactttgaaaaagacttttttccggcgggtatcgttcattttctgctggttgatgaagggagaaatattctgagcgaacgtttagttttttctctacaaaaaagtgcactggcgcagactgaagtccggcctgaccgcgaaaactacttggcaagagagaaggtagatatggatatacagattaaagatataaatggaaaccccatgtcaggcaacttcgcacttgcagttgttgacagaacagacgtgaagccggataccgtttccaacattgtttccaccttattgctcacttccgatcttaaaggacacattgagtcaccgttgagttacctgcaagacaaccgcagttcttcctatgccctggatttgctgatgatgacacaaggctggcggaaatacaacataccggaggtattaaaaggcaacgtaaccagcgcattgccctataatttggaattgggcgacgaagtttccggtaaagtagagggcttgttttctgcattgaaagagggaaatatctctttgctcgcccttaaagattcactcatcgggacagaactgacgaagcctgaccggaatgggcggtttgtattcgataaactggaatatcccagtggtactcactatattgtccaggcgctcagcaagaaaggttcttcaaaagtttttatcgaactggatccttacaaatcgtttcctgctccccgaatcgggtgtattccccgcattgaaaagccgcatatagaagaaaactatatggcaaagatggaccaaaaatatactatagaaaatggaatgagagtctataatctggcggaagtgatagtgacaggtagaagagagagagctgtaaaaacggaatctcccttttattcggtgggagtttcgaaggtgctgacggaagaggatgtaaaaaaaggacattttatttctacatacgacctcttgcgacgtttgccgggtattactatcacgaataatgaagtgcgttatcgatttgctccggtcatggtgttgctggacaatgttcccgaagaaaactttgattttgacctgttggacgtggatgacatcaaagatgttttttactcccctgccacttctgtcggtcctctttacgggtcggctgcgggaaatggtgccatagtagtcactacgaagaatgggtttatacagaaaaataaaatgaatagcaacatgcagactattacgactttaggttatcagcaaactgtagaattctactcaccagcgtatgacacggaagcaaagaaagaatccgtcaagccagacttacgttctacgatatactggaatccgagcgtgcaggttgatgaatcgggaactgttcaagtcagcttttatacagccgattctgctgccgattatggggtagtgatagaaggtgtttgtacatcgggtaatctcatttattcaggtgaaaaagtaatatcgcgtcatagcgattcttattaattttttgttgaagtaatttaaatatatagcttatgaaaaacattacaaacgtattttacgaatttcttatagctttatgctgtttgatgtcttcttccgcactttgggcatgggaagatatgtcgatgcctcgactgcatgttgaaggccgttacctggtagacccgcatgggaataaagtgaacctgcatgggtttgcacagacctatagtccgtggttcaatgagatggggcagaagtgggacaattatgatgtggagaaatgcttgaaatacaatcaagggttgattgatgacattatggctgccggttggaaaatgaattttcttcgattacatatggacccgtattggtcaaattctccgggaattcatgtagaaggagagaatgacatttcagcattcgatttcaatcggtttaaaaactatcttgatagggtatttattccgatggcggaatatgctgtctcgaaaggactttatgtagtcatgcgtcctcccggagtatgtccggaaaaaatagctgtgggagatgagtataatcagtatctcattaaagtatggacacacgtagcccagcatccgaaattgaagaatcatcccaacattatgtttgaactggccaacgaaccgattaatatacttggtcccgatggtacttatggagccggttcgcagggacacttcgataaactgaaagagtattttcagtcggtggtagatgcgatgcgtgcacaaggttgcggtaacattctttggatacctggcctgggttatcaagggttgtataaaggatttgccgtcaatcctatcgaaggagataacatcggttatgcggtacatctctatccgggctggatgggaagtgatggagaaaatggggatggtggttccagtacgggaggctatgaacctttccagaaaggatgggatgattccgtagctccggtagcatcattcgcacctatcatgataacagaaatggattgggcaccgtcaaaatataacgcttcgtgggggaaggctcataccggtacattcggtggtcccggttttggagcaaatatgaaacatattgtagataattcgggtaatgtaagctggcttatttttacgggtgctgatttgttggcaaaatttaaggatgtaccgcccgccgaaggagaagcatatactttcctgaccgatccggaagcctgtccgtggcctacctatcattggtatcaggagtatgcaaaggaaaattatccacgtcctgattttacttatcagtcacatagtgataatggggatggcacatacactaatcctgttatattcggtgactttcctgatccggatgtaattcgtgtgggtgatgtctattatatggtatccactactatgtacattttccccggagccaccattctgaaatcttatgatttggtgaactgggagtattgctgtaatccgttggagcgcatagaggcatccgatggttataatcttgaaaatggtcagaaccgttacagccgtggccagtgggcaacagctcttcaatatcacaacggcaagttctatctcctgtttactacactggatgaaggtggatacctattgaccactaccgacattgaaggtgaatgggaaaagaagaagttaaatgatggtttttatgattgcggattgctttttgataatgataaaatatacgtagtttacggtatcaaccagcttcgtatagccgaattggatgaagatttcaataaaattcccggcagtgataaggatgtggttaaatggtctttccgcgaagggcttgaagggagccgtttgtataagataggtgagtattattacatttactctacgtatggaggatggcctgcttttcaaactgttttccgctccaaggatatctacggaccttatgaggaaaagaagctgatagacgatgacaacattcatcagggagctttggtagaaacgcagaccggagagtggtggactatgcttttctatgataaaggtgcttatggacgattccctaacctgcaacccgtaaaatgggtggatggctggcctgaaataggtgagaacggaaaaggagtcactacttatcgtaagcccgatgttggcagggaataccccataaagtcattgcctaccaatgataatttcaggcattataaattaggactgcaatggggatggaatcataatgcggacagatcaaaatggtcgttgactgaacatgccggttatttgcggttgtatacggcaaatgttaccgacagcctgcataaagccaagaacacattgactcagagaattctggggtatcctcaggacttggaacattcctatggtacggtcaggatggagataggcgagatgcaggaaggcgatgtggcaggattggcagtatttcaggacccttatgcgtttattggcgttaaagtcatagatgggcagaagcggttggtttataccactgcccctgtagtatcgtcggctgcaaaatcggagcagataggagaagtggtcactgaacaggtaatctatttgcgcgctattgccaattacaacacaagtagagcaagcttttattacagcctggacaacaagacctatacaaaatttggggatgacctaaacatgaagtatgatctgacggtattcacaggcaataagttcgctatctttaattatgcaactgcccagacaggaggctatgtggatgtagactggttctctaccgaaccggagtttgatgaagcattctattttgacgactcttttgaggggtatagtgaagaatcattgaccttaatcgaattgaccatcaatggaaaagaagagctcactttgcttaccggaagttcttctacaattacagtgaaaggaatatatgtcgatggccatacggaagatattaccatggcggccgattatgaaaatcagaatccggatgtcatacgtgtaactaacggacgtataatggctttgcaagatggagagagtgatataattatcagttataaaggcccgttgggtgatcgtcagtctttaaagattcacgtcacttcttctacttttccgctaaccgcagaactgtttaatcccaatatttgggagaccggttcttttgatgagaatacacatacattggtgaccggacagtatggtttcggtggctggtggtacgataacggtattgatttgtcggaatacaaatacgttgtggcaaaaataggcaatgataactcaaacaacggtgcttcatttcgtttatttgatgagaatagctattggtcgggagctgctgagtatgaagttaagaacagtaagcaagtggttgttgatttgaataatatgtataagagtaattctaaagtgaaacttgatccgagccatatttatggtgtaggtttctggtcgttcggcggcagccctattattatcgataaagtctatctgactaattccgatgattacgaagatcctacgggcatcgaggatgtgaccgtggataaagatcctctggtagatgtctataccattacgggaatcaagcttcgcactcaggtgcgcagaagtgaggtgatccgggaactgcctgcaggaatttatattgtaggcagagagaagattgccatattgaaataattcttttctgaatttttatgttggcatcactctgtttatagtgactggagtgatgccactattttataatcgatgcgatatgaaagaaaactggaaatatgtgataatagctattttagcaatgactttatcgtccattacaggatatgcgcaaaatccgattgtgcaaacctgttatactgcggatccggctccgatggtttatggagacaggttttatatatatatcgaccgggatgaagggcctgattattacaatatgaatgagtggagagtctattcttcggctgacatggtgaactggactgatcatggagctcagcttcccttgactgctttttcgtgggcgaaagccggaaccgcatgggctgctcagtgtatagaacggtatggcaaattctactggtatgtgtgttgcacagatacggagtcgaatataaatgctatcggagttgctgtttccgatagtcctaccggtccttttaaggatgcactcggaaagccgatgatttccggcggatggggatatatcgaccctaccgttttcattgacgacgacggacaggcttatatatattggggtaaccccggccttttttatgtgaaagtgaatgaggacatgatttcttatagtggggatatagttgaagtggaacaaacggtggagggattcggagggcctaaggagccgaaagagggagtgcagtataaagatttgtatgaagaaggaccttggttttataagcgtggaggaaaatattatttgttgtatgcggctggaggggtacccgaacacatttcttattcaatgagtgacagcccgacaggaccctggaaatatatgggaaagattatgccgttgcaggatacgaatagtttcactaatcactgtggagtagtagatttcaagggaaaatcttattttgcctatcataccggttggcttccgggaggcggtggttttacccgttcggtttgtatagaagaatttaagtataatgaagacgggacgattcctacaattatggctaccaaagaaggtgtagcaccggtaggaacattgaatccttatctgaagacggaagccgaaacaatggcttgggggcttgggctgaaaacgggccaagacagcaatacaggggtttatgttacttccattcgtaatggcggacggttgaaggttcgtgaagtagactttggaaacattggtgccggaatatttacggcaagtgttgcgagcggttcgaaaggtgggatggtagagttgcgtcttgatatgcctgatggagagttgataggaactttatctgtgtcatacaccggtggctggactcaatggaaagaagaaagtacaaatatcattggcagtgtgacaggtaaacatgatttgtggtttgtatttaaaggagacggtgcagaagagctttttaatatggattattggcaatttgccgaaaaagaacaaaataaaagtctggtggctttaaatgcttccattgaccagtttaagattgatattctgcctgggaatgtgcatacggcaaatattaaggttatggccatatacactgatggtacggccacagatgttacggatgaagcggagattagagcggttactccgggagtcgtatccgtcaatggtggtgtggttacgggagtcgcttatggaaaaacggatattgaggtaagctatggtggtaagtcttccatattgaagttgattgtcagggatattgaaaaagaatatactgttgaccggctatcttttgaagcatttggcaaaccggtgaacgagttgaaattgttatcccgcagtcagttgagttatagtttgtttgccatctatcaggatggccatacggaagagataacacaggtagcggatgtcgacattcagaatccggaagtgttgttggttgaggcaggacagattatggcattgaaagatggtgagtcgacggtgacattcagttataaaagcacttttggggaacgccagtcagcgactgtacatattgtttcttccacctttccgttgactgcccaattatttaatcctaatatttacagtgaaggatctttcgatgagactacacatacgttggtcaccggtcagtatggttttggaggctggtggtatgacgatggtgtggatttgtcggaatataaatatcttgtggtaaagctggggaataccgagtcgtgcggtgcttccttcaatatcttcgatgagaacagttattggtcgaaacctgccgcatacgtggttggaggcaaaagacaaatggttgtaaacctgaatgatgcatataaaaagcaggatgacggttcgtctgtgaagctgaattcgagccacatctatggcgtaggcttctggtcgctcggtggcagccctattgttatcgataaagtctatctgactaattccgatgattacgaagatcctaccggtatcgtagatgtagttgtggataaagatcctctggtagatgtttataccattacgggaatcaagcttcgcactcaggtgcgcagaagtgaggtgatccgggaactgcctgtaggaatttatattgtaggcagagagaagatcgccatattgaagtaatatgatgatagaatctgattagtttacatgaacaaacaatcagctttttagaaaacatatttataaggatgatataatccggcctacagatatttgtagccgtgttttgaaagggctacacctttttgtccggatggctacacccttttactctcatggctacaccttttcatataaagggtgtagccattccaaaaggatactttactcttaaatataagttattgaaaaatatttatttaaaataaaaagtctttcctttttattgcttatatttgtcagagtgagcaacctttaaattttagtagaaattaatcatatacaactataccatgagaaaacttattttccttttcctgctttgcatcgcttgtatgcttcaggcacaaaatgtaattgataatcctaagtttaaattccgttcgggcagcatttataatattacccgcattgaacgtactccggatgcaacgaggttacatatccatgttattttccgtccgcattggtgggtaaagacaggcaaagatactcatttggaagatgcgattactggtaagaagtattatataaccggtagtgaaaactttgaattagaaaaagaagtatatacaccagattccggtacgttgaattttgtacttatttttcctccacttcctaaggagacaaaagaaatccatttgcttgagtctgatcatgatgaactcaatacgtactatatatctttggagaaggaagatgccaaagcctcacttttcgataaagtctccggcaactggatgggaatggacgactattatgaatgggcttttggcatatacgattctcttgctgtcatggacaatcgtttctatcagtacgaagcaatccgtcagaaaggtaaaagtatgctgttgactttgaaagatgaccggggcgataaagtggagctggaacttaccccgcaaaagaatggtttgtgccggataaggaaagataaagaacctgcccggctttattcgcgggatacgggaagcatgaaggcgatgcaggttgaagagaatgagagtccggtattccgtcgggatagcgtttgcctgcaaggatacattgccggctatgatcagaaattaggctttaccaatggtctgatttatgtttctaatgatttgacaagagaagattatccgatggtggtaactctgcaacctaatggaaggtttgaatgtaagtttgagatcaactatcctatggtaagttcggttgtgttcaataatgattggatacccttttatgtagaaccagggcaaactgtaacaatgtatgtagactgggaagctgtaatggcacgtagtcgtgcccgtgattattattatcctcttcataatgtccattacatgggatctaccgcatatataggaaaggcgttgaaatatgtagatgatttattcgtatttcgttatgaagatttctcgaaaatgcagaaagaactgacccctgcacaatttgtagagcgttgcgaacccatgtttcgtcgttggtcggagcaggccgattcacttgttgctgccaatcgatatgtgggaagagcggcacgtttggtgagaaatacggcacggatttctcaaggttataagatgttcgactttgttatgaacagaagttatctggcgcgggagaataaagataatgaggtgctgaaggttaaggaagattcggcttattataacttcttacgacagatgcctcttaatgacagcattatcgtagcggataagaattttagtagttttatcaatcgccttgaatatatgaattttgcaagggctatgggtgatacgacgactgttgaaatgggaaagattgcctataaatatcctgaaaaatctgtccttacttatttgaagaagaatggtgtagtattgactcctgagcaggaaaaaatgagaaaagatagtgaagacagagctggtaagactgtgacaagagagataagcgaactcattgcggagacgaagatatgggaagaacttagagaaaaatataaggatttattcgaagcttatcgaaaggaaaacgaggtaatgaatgatgtttctgtatctattgatgaaaatcagaaagcagaagatgaaaaaataatgagaataaatcaattctttgaaaatcaaagagagaaatcgggacgattggataccatagtcggatatgtcccgttggtttcgcagatcattgctttgcgaagtcttccttttgatttaaaacaattggatagagaaggtgcccatagtctgttggataaagaaaagcagctaatcaatcatccattcatgcttgctgaggcggagcgtttgtatgcccaagctttcccgctacaaaatgatagcacgtatgctttgcctgaagggcctgctactgaaatcttacgtaatatcattaaagcccatgcaggtaaagctttgtttatcgatttctgggcaacgttttgtggtccctgtcgtagtggcattgaacacactgccggtttgcgccaacagtataaagatcacccggattttcagttcatatacatcaccagtgatcgtgaaagtcccgaaaagacttataatgaatatgtagaaaagaatctgaagggtgaggcttgctatcgtattcctcaggcagattacaactatctccgccaattattccacttcaacggtattcctcattatgagtggatagaaaaagatggtactgtattgcgaaactctccgggaacttataacctggagaaatatttgaagaagcgtttcgggaataaagattgatattttccattattaagtattattttagctcttgtttattgaccggaagttttttcttacgtatcatataataaacgaagatattattatgatggaccagaaaaaaatacaagagcttataagtaggagccagcaggaggatgcaatagcattctctctgctggtttctacgtttcagccacttgtattccggcttgctttccgattgctgtgcgacgaagatgaagctaaagatatggtacaggaaacctttgtaaaggtgtggctggcgctgggtaaatataatggtgagtgccgcttctctacctggctttataaaatcacttgcaatacttgttatgaccgtctgcgctccttgcaccattcaccactcgataatgaagcagattattccgtttccgcgaatatctcgtcagatgataatgtagaattggcagtggtgaacaagcaactgcgtgaactaatcctgagatataccgatgagctgtctccccggcaaaggttgatttttacattacgggatattgaggaactggatgtgccggaggtgcaaattatcaccggactttctgccgaaatcattaaaaccaccctttatctggcccggaagaatatacgaaacaaaatgaatcaaatagatgctggcttatgaaacaagatgataaactttacaatgaatggcttgatgaggtgagaaatgtacagcctatattgagcaatccggatgaactgactaccgccattttgcagcaagtgagcaggatcgttccccaaaagaagaaaaggaaaagcctgctgattggcagttgggtatccgggatagccgcaggacttttgttgtgcttgttggtgagtgagactcttcttagtccggttcccgatggtgtcagagtagaagaggaatatcgtttccaggaaaacagtgcttattccctaccggaaggctgggagaggatgaggctttctgaaaagagcgattacctgtccggacagtacgtgcagtataagaaactcaggcaaaagagagtaatggaacttacaaagaaaacttattaaattatgtcattatgagaacgtataaatggatggcaaccattgttttgctgctcggtatgacttcttgcggtacctattaccgaatggtttctcaggtaaatagtgatggtagcatgcacagagaggtatatgcttatggcgactctgctttccttgcaggagacaggaatcataatccgtttttattccgaatagattcgggatgggaagtgagcaatctggactctgttgttaaattcaactgctggggagatgaagacaaactgaatgtgaaagtttgccggacttatccaacggtaggttccgatagcttcagtactttggatggaaaggaatacagtcttcctctggtagttccggttgaaaaactccggaaaagcttccgctggttctatacatattatcagtatacggctacctacggtgaattacccgataaaggtccggtacctctcgaaaattatatgaataaagaagagcagcggatatggttccggggagatcaggaggctttgatcggattaaatggtattgaacagaataataggttggatgacattgaagccaaattctggaaatggtataaccgtagtcagtatgacttgagttgtgaagtaattcttcatttcattacgataaaaggagatacggcctttgtacatcagttggcagatctgaaggaaccggtttatgggaagtacttttccggaaaagataccggtgatgacggatcgcccgaagaggtatgcaattatctggatgaattgagtcaaacgaaatatttctcaagtttatatgcggacaataaaaagccaatggatgatttgtttgaggaaaaagggcggattgcagaattgtttggttatgctgtgcagtttgagttatccatgccgggcagggtggtttctaccaatgcagccatgcaaaaaggtgagtcactcatttggaaagtagatgcttttcgtcttttggacagtgattatatgcttgttgccgaatcccgtgtagttaattattgggcttttggcattacattattactgatattgcttattggtggatactgttggagactatatagaaagctttcataactctgtagaattcatatatatcatattaatgccgggagtgctactcaccacttgatagtagcatttcccgttctttctttgtcaggcttttgacaacaatgtcataagacttgcttacgagttctttaattttctcgtcaggtacatcctgattaaagtaaacactgatccagtattttttattcatgtgccatccgggctttattcctatatacgtggtttgtaattctcctgattcttccggattgcatttgatacagcaaaagtcaaagacttcgatatttacaaagcagaaccatttatccgctacataaaaacatagaacatcacgactgtatttatcaggaacattcagaaacggcattttctcacgaacaccttttaatgacaggcaatattctctaaattcttcaatattcattttgatagatttttaaacagtatgcgaaggcaaatataacacttttagggtaaattctgattaaatacctaatatctaaaatcaaatatctgtaatctaaaaggagtgtttcatcagtaggttaactttgcgtacatataaaagttaacctaatatatctgatgtatgaatacgatgtataaccgacaaactatatgggtattagtcatgataattgttatggtagcgggatgtcggatgtccgatacggagaatcctgtattccgtaccataagcaatcctctcaatttgaattatcgcttctgcctcaatgatgtttcccgcagagatgctgcaaatccctgtattgttcagtttgagggcggttactatctttttgtgtttggttcgggaggatattactactcttctgacctgatagaatggaaattaattgacgatacaaatcttcctacagaaagttttgctcctacagttgtggaaatgcatggtgaattgtattacactgcttcttatgctgcagataccatttataaaactgataacccgaagtctggagtttgggaagcggtagcttgcagttttcctccgggaatgttggagccaatgcttttttatgataaaggaaggttatacttgtatgcgggggcgggtaattctgtttctttaacgggagtggaagtcgatccgcatacatttcaattgttgggtgaaccttctccattaattagaaattaccaacagggtaatggatgggagacacccggtgatcgtcatgattggctggacgcgactccttggttagaaggtatgtggatgaacaaacgtggtggaaaatactacttacagtatgcttctcccggtatacagtttaaaacttccaatgatggggtgtatttttccgacactccgttaggaccttttgtcttggcagagcataatccgcttgtttacaggccggaaggatttactaccggtgcgggaaatgggggaactttccaggataaatatggcaattattggcatgtaggtactgttgctgtcaccgcccggcattattttgaaagaaggttggctctatatccggttttctttgatgaagatagtgtaatgtacgcttatacagaactgggagattacccaatgattgtccctgaccataaaataacttctcctgaggagctgtctcccggttggatgctattgtcctataataaaagtgtcaggtcttcttccgaactcagaaaatatccggcatgttgtgctgttgatgaagatatacgaacctggtggagcgccgaaacagccgataaaggagaatacctgtcggtggatttgggtgaagagtgcgaagtaaacgctgtgcagataaactttgccgaccatgatgcccatttgttcgggcgatcggatagtgtcttttatcaatactatctggaagagtctgcagatgggaaaaaatggaatgtttttgtagacaagtcaataaatacagaggatgctcctcatgattatatccaacttaaagaagccgtgaagacgcggtatatccggcttacaaatatttattgtccttccggtaaattctctgtttccggcttacgtgtatttggacggtcggataaaccttctccgcctcaaacgaaattttatcgcatttgtcggaataaagaggacagaagaagtgtcattttgaaatggagggaagtagaaggggcaactgggtatggtattcgttttggaatccatccggagaagttgtacaatagctatatggtgtataatgatactgagattgaattgaggtgcttacagaccggacaaacctactattttgcagttgacagtttcaatgaaggaggcattacccgtggcgatataatgaaagaaaatgaataagccttatgtatgtatgaagatgaaaaagtatatcttgtattttcttttaggagctttggtaagcgggtgtggggggaatagttcttctcacgttttagaggatgtcatcaaggaaaatcctcagttgcgagaggtactgaaaaggtatgaggctgatacgctgaaattgcgggcggccgagtttctgatagagaatcttccgtattattgttcgtatgagggcgagcaggtggagcgttatcagaaacagttcgaactttatggtaccggactgtatacccccggtgaagtgcaggattcaatccggaaaatgtatggacgcattaatcttagaaaatcaacggttaagcctgatttagagcttccagccgatttcctgatagacaatatagaatgggcgtttaaagtctggaacgaacagccgtggggtaagaatgtatcttttgctgacttttgcgaatacattttgccttacaggatagaagacgagcctttaaaaccttggcgtgagaaggtatacaatgctttcaatcctatattggactccgtcagggcacttcctgaggcacaagatcctttatttgtttcacgggtattgatagactccatttcccggataaagtttcattttacggggcagttcggagagggcccgcatatcggtcccgatcttgtggattggcattccggcaattgccgtgagacagcggatatgctgatttatattttcagggccttaggcattccttgtggttgcgattatatgcctttgcgcggcgatggaaatgtggctcacttctggaattttatattggataagaacggtgagtcatattatatgtatgaaaccggtatgctggaacctgtccgtaaatattggggaataaaatccaagatttatcggcaaacattcagccggaatgaagatgtagtaaaggatatgcggaaagatgcggaagcggtttatccttcatttcggtttccccactttatagatgtgacgagactgtatagtggtaagcgtgcccggaagctgaatatacctcgtgagaaactttttcataaagtaccggaggatgaagtagtgtatttgtgcagccctgcatggacggattgggagcctatagcatgggcgcatcccggagaaaacgatgtttcctttaatgatgtggaaggaggggttgtactccaactgtctgtttataagcatgggcggcttattccggtgtcagatccgtttgtccttgatggaagcaccggaggcgtccattattttgagggttcggatgaaacggaagaaataaagcttttgaataagtatcatcagtttattgagccttttgcacaacgtatggttggcggagtttttgaaggcagtaaccgtgcggattttcttcagaaagatactctgtacgtagtgaaggaggctccggtgcgcttgtatagtgttgtgacgttaagtagtacaaaacactatcgatacgtacgatatgtgggtcccgaaaatggctactgcaatgtttcggaagttgctttttatgaggatccggcggacacttgtgctttacagggtagggttatcggtactcctaatgggcaaaatggagatggaaagcatgattatcggaatgtttacgatggcgacccttatacctctttcgattattatcagccgacaggcggatgggcagggcttgatttagggcgtccttgtttaattcggaaaataatatttactccccgtaaccgggataattatgtgcgcgagggggatacgtatgaactgttctattcttctaaaggagagtggatttctatcggtgaacagatacctgcctccgattctctgctctatatggctcctaaaggagcactgctttatttaaagaatcatactcgtggaagtgatgaacggatttttgaatatgaagaggggagacagaggtattggtgacaattagaagagtgctatgatgtgtaaattgtgtaaaatagagagtcttttattttgtttattgtgttttgtgagcatattcttttactcacatcacatgacggatacttatattgtacctaaatggtgtttcacacttcttgttctattagttagcatctttgttttgtctataaagaaattatgtaataagacaattcgaattgatattgttgcgtatggttgtatcatagttcttattactttttgtcaggcactctatggaataggacaatggtttcaatggattccatctataaggcattataaaatagtgggtagttttgataatcctgcgggttttgcatcctgcttgtgtatagggtttccatttgtggctctatgtttgaaggtggcgaaaggcatattgttgaaagtgttcttatatctgttagcctcaattattattttggctgtcatcctatctgaatcccgaacgggtattatgagcattgtggttgttgtgagtatatattattggcattatgtacctttgaagagaaggactaaaactatagttcttacaggtgttttttttctgtttttaggggggagttatttcttgaagaaagattctgccgatggcagattacttatctggaagtgctcatgggaaatgataaaagactctcctggctacgggcatggaataaatagttttagaactcattatatggattatcaggcacatcattttgaacaacatccggatagtaagtattcgatgttggctgataatgtactatgtccttttaatgaatacttggccgtattggtggattttggattcttggggttctttatattattgatattcatcttttttcttcttttttgctattataaacaacctggagatgagaagcgggcagcattgctttctctcttgagtgcaggtgtcttctcgttattctcttatccttttacgtatccgttcgtatgggttatagtttgttttgatattcatatactgataaagagagttgggcattggagatttactccggtttataagaagttgtcatgtattgtttttatagtgctttgtctaagtttcttatgtaagttatatcagcgtatagaggcagagtatcggtggaatgatgtagcttatctgcatgcaacgaatgaaagtctggctgtttataaaagcttaatgcccatattaggcagtaatccttatttcttatataattatgctatcgtacttcttgatgtaggcagtttggatgaaagtttggataaagctttgcaatgccagacttattgggctgattatgatctggaattacttttaggagatatttataagcggcggaaagaatatgagatgtcagagagatattataagaaagcctcttatatgtgcccttgtcgatttatacctttataccgaatgtttgaagtgtataaagaggtgggagatgaggaacgctatcggtcaatggcacagttgattatagaaaagcctgtaaaagttcagtcttcaatagttagacagataaaacataaagtgaaacgagaagttaaataaacagcgaaggatagtatggaaatagataaaattactttagaaagagaattcttagataaattgttatccttgaattatttgaatgaatcagattgggcagaactggaaagtttggtaaatctattgcaaaatgactttacatgtaaagttcgtcaaaattttccgatgctttcaagggatgacattcatattatacttttgatgcacattggcatgaagaatattgaaatagcacgattattgcatattttaccaagatctttccgtatgagacgttgtcgtttaaaaaggaagatgggggtagattgtgattcactgtcggagtttatcaagaagctgtttagataagaaaggtagctcaaagcgtatacaaatttcgtattagaagttttgtatacgctttgagtttgatttagttatatgaaatggctatctatgcaattaattttaaaggaaagaatgaggcttaatatattcggcatgatagaccgcaacaatcgttatgacggttttagtacgactgaaaacatcactgtcgataaagtcgtagactttcttgatcgcctttctttccggataaagaagaacacttttgttgtcttggacaacgctcgggtacacagatgcaagcttatggcagagctcagagcaatctgggacgaagattgtttcttttcttcctgcttccatactcgccacatctgaacatagcaggaaccctttggcgcatactcaaaggtaaatggctcaagtctacagactatatgtacacggattccctgctttatgccactggcagagccttggccgcggttggttctgaactctatattaattttgcctatgtggcttagtataattttatttttatgacttacttaattcttaagattcttatattatgaaatatgtgacattactaattacgttatgtgtaattgctgtaaatattatttatggtataaatatatctagaagtctatacaaagaaaaaaagtatatgagattatctttctattctatatcagttgttttacttattgtcatcttaataatgcagtgctgtcttttgttaaactcatagtaagattatggatgttaatttttcttcatccatattcttttcaatttattgtaatatgtcctatttgagattaatcataatactatcgttgagcatatttttattttcttgtaataatggtactgctcaaaaaaaattaaatttgattttagacaataaacaaatagattcttctctgttttttgtacttgcacgtaggagaagataaaaatgccccatgcaaagaatatcctgattttataaaaaagaatttctcttattatgagatgaatttaatagaatttgatttctttaataaggtttttaaatacttctaattctttgtgtatgatcattgatcgagatagtgttatttccatgtttccttataatgagctctctaagtttgtacgtgattttaagtcaaagagtactttttcaactgaaagtataagtcgtgattgcaaaagttttgatttgaaatacataaatgtattatttcgatcttattgtaaattaaggagaaaagatgaaatatttatgtcagatataacaaatataattaatgaaaaaccaacgttttatgcaaaatatttattggctcaattgtacaaacagattgatgtaaataaaacaaagctattatatgatactcttgaagaaaatgcatcattgcatattttaccaagatctttccgtatgagatgttgtcgcttaaaaaggaagatgggggtagattgtgatttactgccggagtttatcaagaagctgtttagataagaaagatagctcaaagcgtatacaaatttgatattgaaaaatttgtatacgctttgaatttgattttttatacaaaactctttcctttatgtaaattttaaaatgaaagaatattatgtgatattaaaactttgagtaggatgaatcaaaaggcagcgattcaagaaagaacaatagtttctatacctacattctattgtgtttattatgcctttttaaaattattaagtttattgttatggtttgtaaaacaatgagaatggtgtcctctataggcatgttagtattatctgttatttttacgttatcgagctgtaattcggaaaatgacaaagttgttgaagaggaaggtaatgatcagataattgatcgcgtaattgaatcaaatgagtatatggagtttagagtgagttgcatggctctcgcagaaaagctcaaatcgtatacttcgacattgagtttggaggaatttgacgaacttatgagtaatctgaataatgatgattatatggctgagctggttggtaaaatagatgttaaaaacgaacttttaatggtggaaagtactaaagaaactctattgaattatgctgattttcaacaattggatgcttctgaacggatgaatctttttgtgaggtcttctgataatgctctgaatatgatggtgaaaacccgtagtgaaggcggtgcagctgatgaatgtgaacgtaggcgtaatgaagattattcttatgcttcttcaatttatgtatcggcaatgcttgcttgctcttgtgcgacgggcggaattggtgtatgtctttgtgcggttgctgcttctgctgcttatgaatatgctataactttagcagatcgtagtttcgctgattgtctaaagaatgcaaaatagtattggctatgaaaatactttactgtattattataggaactgccagtgtatatgtattgtttatgttgattaataaattttattttaattattccatgaactacctatatccttctattatatatatattgatgtggctttctatttttctttatactattggtaaattttttaagaataaagaaaggggtgttagggcttatataccaagtttcattgttttcgtagcattactattgagcgttcttgagatggttagaaatctatagtttgtataaattcacatatggagttagaataatttagtaggatggggatcccatcctactatttaataaaatgaaggtactaagaatgtgtggatttataaaattttctacttgtaatttaataaaagatgtgtcactttttggcactttattcaatattggtccttctaatgcaaaatttgtatacgctttgagtttggtttagttatatgaaatgtttatctatacagttaattttgaatgaaagaatactatgtgaaattggttttttagtagaatgaacttaaggcaatggttcaagaaaggatagcaaatcttttacctacgtatatggtaattgaagtattgcgacttttgtattgctttttatattatttgaaatgatagtttaaaacaaccataaattttatcgttatgaagtacttgttgggtttattaatagtagtctgtgtgggttggcaaagctgtgccaatgatgatactatcattgaggactgcccttctcagaagtgtggaatgactcctgaggaggtggaagtgagggttgaagagattcgaaaaaaataccctgatattaagaattggtattatgaagtcaaagactatgattcgatatcaaaaaaagatcttgatttattagaagaaaaaatcaagaaattgtctgaatgggtagatgaagatgaagttaaggatcagtaaatgataaaagagtgattctactaaaataacaactaaatgatcaataatatgaagtattcatttgttttgaaatacattataggaggtgcagtagttgcttttctattgcagtatcttttcaatgaaaaagatataacattttggatgatcgtatgtcttacgatagctgttatggttgctattcatatgttagttcgttttttttttctattatcaaagaaaaataggtaaaacaaacattagctgtgagtttccatttcatagaaggaaatatatagcactttgaacagtatagaattaaaaaaaggagcgaaaggcttgaagttttaaatgtgtctgcaatatgtaataaatcaatgataaaagaaattattaaatatgcgttagggcttttaatagcactaatattggggtatataatacggatatacatgtgtcaatggtttggaattgaagaacctacaattattcactctctttttaccggtgcatcgggattttgtgtgggtgtatgggtggttatgattaaaaattatcaaataaaaaaaagtgatagagctttgtataataagtgattatgataggctttgaaataagtataaatggtcgggaacctatagttgccgcttctgattattttgtatttgcggatttggcattcggatgttcttccggcagaatcaaaataaaaggaagtgatgttctgcattatctcacttggctcacagagaagttggaagaaggtgacagagtcttgataaaaatggtcgatacggataaggtatcgcctgtcttgacaattaaagattgtgatcgcaatgagatgaaaaggagatatgagcaattaaaaatggaattaaaaggaaggggacttatatagcatgaaaggaattattgtaaaatggagggatactgtttggaaagcgggtattccaaatggtgaagttagtcttatgataatgcaacatggatatgatggaggctattggaatatcggaggtttgaaaatgcccgaagaaatacatgttacatggaatggaggagagtttaaaataggggatgaaatagaagtggaatttgcggaattgaatgaaattacctctactgttacagaaggaagtcatgaaagcctcctgaagaaagcatgtttgttgagtgatgataacgacgacgtttggaatcgtaaacttgatacctattatcggttaaagaagaaattggaggaagaagggattattgaaagagagtagttttttactgaatcgttgataataatattaaaatggataagaaaatagtactattaataatcttgtttctcgtaggaggaagaaccttctctcaagtacattacagtattgagggaagtacagatcacgaatatgaaggccgaaaagttgctttggttatgttggaagaggataatcggcaggctgatagtacgaatgttgtgaatggaaaattcgtttttaaaggagagctgttgcagtcttgctgggcggctgtatgcattgatggtatgggtgggattttcaccgtacttgagaatggaaatattcgtatttgtacagatggtaaggagggttggtgcgaaggtactccgattaatgatgtatttcaaaagagttggagagagtatcaggtgctgaatcaagctggtatagatgcttttaagaaattggacagtctgaatgttgaaactgaaaggaaaaaagaattatatgcaattacccgtgaaaaggtgataaaacaaacaaaggaatttataaaaagaactgtttatgagaatcttgataatataattcccgcattttggattcgtctttttcaggaacagattaccggtgacgaattaaatgctatgcttgccggtgcctctcccgtgttgaaaagcaatcggtttataacaaaattgcttagtgtgcaagaaggtagtagttttgttgattctaaagtagaattaccggacggcacaaaagtatatttgtcggattatatagggaatgggcattatgtgctagtgaatatctgggcttcgtggtgtggggcttgcattgcagagttaccggaaatcagaaatgcgggcgagaaatatgcttccaaaaatctgaagttattatctatctcaatagatcgtgataggaaagactgggaaaaagcacttaagcggttagggctcccttggacacaagtgctggcggattattcgtttgtgaattcgtatggaataaataaaataccggtattgatgttgatatcacccgacggagtaattcttaaaagaaactttggtatagaggatttgaatcgccttttccagaactgaaaagcgtaaggtggatatgtattctataaatgaaataactgattacttgttcgctaatggtcatataatgtaaatgtagataatatgagacatttgattgttttattcagtgaaatcttattagtatctttaaacttttatattattctaaagaatcctttggaaaaagagtataggacacctgtaacgctacttatttgggtatttgttatgataatagtggactgctttttgaagaagaaaagatattataaggaaatgcgatacattataagtcaattattgtatacgataatttattcaatgcaaccataatcagatgatgaagttgaaagtgaatatgttaaaactgaccaaatacagttccttttagtttttttacatacaggtaaagtgcattctgatttggataagataaatgaattaaagaagttaactgaagattcaaattctgtgatattttattatgaatcgctgcattaattggcattgatataataaaccgatgatgaaaaatcataaatcagtgctgatgaaagttccaaattctcgattactaaataagcttcagcttttttcttacagggaaagatatttctctatttcctaatcctacaccttgagaaagtattttaaactataatatattgatattcagactataaatgtgcttttgtatatcttgcacaattccttgtaaacatcttttttatctgtttttgggtgtaggatggaacttttctatactttcctacatcacttcctacactgtttatctatttgataatcagatgaaaatgatggctggtgtaggatgtaggaaagttatctcttcagccttgtccacaatgtggtcaggatgaaaatcttccggttcagtgcgtgagcaaaatcttcaggatctcgattacaagtaatttagtaattttgtatacgctcttaattagtttttctcatataaaagcactatctatgcaataaatataatgaactatttaaaaatgatattatgagaaacaaaactatttttagagtagcggtgtgtataatcatattgttgacttttattctgccggtgtctgcgcagcaacctgataagacgaatgagtacgaagtatctttgaaaaagttgatggaagttaccggcgcgtcggcttctattgatgaggttctatcgtatactttatctgtggcaaagatgaatgcatctgaagaagatgctgattattgggatacatttactaagtcatggagggagaagatagagaagatggtattggaaatatatctgcctgtctacaagaagcatttagcattggatgatctgaaaggagttatttcattttttgaatctcctttgggcgagcggtataaagagtcggcaatggggattatgcgcgaagccatgccgctgttggttagtaggttacagatggatatgggaaaggaattgcgtccgaaaattgacaggagtacggaggtagtggatcaaacaagaaatcgggatcaggaaatatatgatgcagcctatgcgcttcctaaagatagcattgaggttgctgacaggccctataacagagcaacaggaacaaaacctttattatattccattgaaagaagagcaaaagatacgaaagtaacgtttcttcaacctatttactttgattggcaatggttgtattacagtcccggttttgtgataatagacagaaaaacgggtgatgaataccatgtgagaggatatgacggaggagctccccaagatcgattattgactgtggaaggttttaactccaaatatatctatgtcagtctgctcttccctaaactgaaaaagagtgtagaggtaattgatattcttgagttgccgcatgaaaaagacaaattgccttctaatgatgatggggttttcaagacatattgtgatgtgaaagtaaaggattacttgttttcttccaagaagaataccaagaacgtatattattagaaactgttttctttattagtactttccggaacctttttgagctttttatctattttcaataataaaatatctgaaattgaaaatcatggagggcagggcgctcttatatttgtacaaaatataagtgtgaacctatgaatggtaatttagtaattatacggttaggtattgcatttctcagtatgctgatgtttacgatgtgcaatacgggtgacaatgtacattcttatgaagctgaaacggctgagagagcgagtggcgtatcagagaatatagataaagaagcatctggtggaacaactgttgaactgatgaacaagggacagttcgtctgtttcagaaatcttccgactgctgataagatagccattcgctatgccactgagaatgtaggtgtttttagtctatcggttgatagtcaacctggattgaaggtgaatatccactcttcgggtagttttgaaggtagctttctgtatgctgttgttgacgtcaatattcctagaaatggttctgtaactttgtctgtggaagagggagatgtagcactctgcatagataagatacttgtcggcaaaggtgattttggattgcctcctgatatttggaacttgccgaaacttgaagttgccaaaggaccttttgttgccgactgggatagtctgagcaattactactccgctccggactggtggcgtgaagcaaagtttggtgcatggtcccattgggatccgcagtccatgcccgaatatggtgactggtatgcaaggaatatgtacattgaaggtcattggcaatacaattatcatgtggagcattttggacatccttctgaatacggctataaggatatatgcaacgactgggtgatagataagtggaatccggaagaattgatgaagttgtacatggatatgggtgctcgctactttatggcgatgggagggcatcatgataattttgattgctatgattccaaatatcagccatggaattccgttcgtgtaggtcccaagatggatattataggtatatgggaaaaagtagcccgtagtcataagatgcgcttcggcattggttttcatagttcacctccacgcacgtgggggcagtgtatgacggttcgttatacagcggatcgtgatggagataaggcaggtgtcccctatgatgcgatgcaaacaattttagacggtaaaggtaagtggtgggaaggcatggatcctgccgatctctacggtccagaacatgatgtcatggatcctttactctcaccctttgccaatcaatttatgtggcgtgtggatgatgctattacaaaataccatcctgatatgatctactttgatgaatctgcaggcgattcatatcttgatcttggtgtgaatatggggttggggtttctcgctcctcctttgatagccaattattacaataagtcgatgacatggaacaatggaaaactggatgtagttttcaatgccaagggggtgggcggacgttacaacagcttccccaataatcctgctctgataccgatagtggagcgggctatggtaaaaagcactgaattttacattgaatcggaaattatggcctatccgtttcagacggagagaagcctttccgattggcactataaaaaaggagcaccctatgcacaagcagatgaggtgatatggggattgatggaaaatgtttcccgtaatgggtctttactgcttaatatcccgcaacatggaagaggggatgtggatgaggaggctgtccgcatttgccatgatataggtgcttggcttaaaattaatggtgaagcggtctatggttcccgtccttttgaagtatggggagaccatcaggtgctttttacgcgtaatggaggatacgtatatgccactctgctgaattggaatgacagcgcgattactttaaaggctttgcattccgggggaacaactgtaggagatgtgactgaagttgtgatgcttgggtctgatattccgtttacgtttactcagaatgcggatggcttgatggttaagccttccggagaagtactaccgttggcaggtatagagaatgcatcgctttcctcccggtatcgtgttttgcgtatatcacatactaaaggatggatgaatgatgatgatccgggtgttacggctacaggctggaaacgttactgcaatttgaattctggtgattacaataatgatctgactgtcagcgaacgtgtcggtgatgtttggtcgtgtagctttgaaggaaagggctttgatattattgctccgaaagaacagggggctggtagcatggaaatacttattgatggcaatagccattcgattgttgatctttctacagtaggtgaacgtttacctcaacaagtagtttgtcaagtggcaaaccttgcaccgggcaaacatactctttccattattaaccggaaggggaaagtggctgttgatgcattatgtttcaggtgaataagtcgatatagtcctattctataacgtttttatgttgatcaatatccttatatttgtatcattttgttggtggatattttattattggaagtatgaaggaattgtttgctttgatcttattgtgtatatgtacaacttgggaagtatatgctcatgtggggggatctgaatctgctgccggaaaagtaatgccattgtcgggtgcggaagtggaattgcttccttcatggataaagcaacgggaagttttgaataccggatatttgaagtctctggatcccgaaaggttattgcataacttcagggtgaatgccgggcttctttccgaagcacagcccttggaaggttgggaagctccttggataggtctgagaggacatttcaccggacattatctttctgcggtttcgagtttggtggaaagatatcatgaccccgtatttatagagcggttgaaatatatggtcgatgaactctataaatgtcagcaggtgcttggcggcggatatctcagcgctttcccggaggcggactttgacaagctggaaaaggaatttggcggagtttgggcaccttattatacttaccataaaatcatgcagggtttgttggacgtttacctctgtaccggaaatgaacaggcttatcggatagtgaccggaatggctgattatgtagaaaggcgaatggccaaactaagttcggaaaccatagataaagtgttgtatagtgttggagcaaatccggccaatgaggcgggagccatgaatgaggtgctctaccggttgtataaagtttcaaagaatccccgtcacctggctttggcgaagatattcgaccgtgattggctggttgttccgttggcggcaaacaaggatattctgaatggtcttcactccaatactcatctggtgctggtcaatggttttgcgcagcgctattccgtcactcaagaatccatgtatcgggatgctgccctcaacttttgggatatgctgatgaatgagcatgcctatgtcaatggctcaagtagcggccctcgtcctaatgtgactacacctacttctctgacagccgaacattggggagttccgggtgttctcagcaatacgctaaccaaagagatcgcggagtcgtgtgtttctcacaatacgcagaaactgacttcggaacttttctcctggactgcggacgctttgtatgctgatagctatatgaatacattctataatgcggtaatggctttacaaaacgcccgtacgggagagtgtgtttatcatttgccactagggtctccccgtaataaggtttttctgaaagaaaatgatttccgttgctgtaatggtacgagtatagaagcttttgcctccctcaactccggtatttattattgtgatgagaccgctttgtgggtgaacctttatgtcccttcaagagtgatttggaaagacagagtattggaacaaaccggtaattttcctaatgattttgtggtggagttcactctgtcggtaaagaagaaatcggatttcgaactcaatttactgctaccttcgtgggctaagagagcggaggtttatattaatggtgagaagcaggtggctgaagtagctcctatgtcctatttgactctttcccggaaatggaataataaagataagataaaacttgtacttcatcctgatttttatttgaagacgatgcccgatgatgagaatgtaatagcgattttctatggccctgtattattggccttcgatacacattccgaactcgtgttgaaaggggcacctcaggatattctacgaaatctttcccgaaacgaagatcatactttctccttgacagacaacggaagaatctattcgcttcgtcctctttatgaagtagaagggcaagcgtatggagtgtatgcccgaatcagggaatattgatgaatctatttagtgatacatcttgaactaaaaaatattctaaataataatgatatgagaaagagactattcagcctatttgcgttggctattggattgcaaacggttgctttatcccaaaaaaatgagtggagagatccggaggtaaatgctgtgaatcgtgctccgatgcacactaattattttgcttatgaatcatacgatgctgcccgtacaggtgttaaggaagaatctgataattttctgtctctgaatgggatgtggaaatttaattgggtaaggaatgctgaccagcgtccggatgatttttatcagttgggttataatgatagtgcgtgggatgaactgaaagtacctgctgtatgggagttaaatggttatggtgatcctatttatgtcaatgtagggtacccatggaagaaccaattcagaactgatcctccgaaaatacctgtagccaacaatcatgtaggatcctatcgaaaagagattgtcataccggcggaatggaagaataagcaaatctttgtgcattttggttctgtcacttctaatatctatttgtgggtaaatggtaagtatgttgggtatagtgaagacagcaaactggaagcggagtttgatttgtcgggttatctcaaaccgggaaaaaatctgattgcatttcaggtgttccgttggtgtgacgggtcatatcttgaagatcaggatttcttccgcttttcgggtgtgggacgtgattgttatttatatgctcgcaacaagacttgtatacaggacataagggttactcccgatttggatcagcaatataccaacggatcactggacattgctctccaggtgaaaggacggggtaccgtagagttggaactgtcggatgcgaaaggcaatgtggttgcaaacacccggttgaatggttcgggcagtctttcgactgttatggaggttaagaatcctcttaaatggagtgcggaaatgcccaatctttattgcctgaccgctactttaaagaatggcaatgatattttagaagttattccggtaaaagtgggtttccgtaaagtggagattaaggatgctcagctgcttgtgaacggacagcctgtacttattaaaggtgccaaccgccatgaaatggatcccgattatggatatgttgtttcacgggagcgtatgttgcaggacattcggattatgaaacaattcaatattaatgctgtgcgtacgtgtcattatcctgatgacaatctttggtatgaattgtgcgatgagtatggtttgtatgtcgtagctgaggctaatgtagaggcgcacggaatgttatatactaataatcagctttctaaacatgcttcttttgccaaagcacatctggaacgtaaccagcgtaatgtgcagcgcagttacaatcatccttcggttattatttggtcattgggcaacgaaaccggtcccggccctaactttgaggcttgctaccgttggataaaagcggaagatgcgacacgtcccgtgcagtatgaacaggccggtcatgattattataccgatattttctgcccgatgtatttgtggtacagtgcgtgtgaggattatgccaagagtaatgctactaagccgcttatacagtgtgaatatgcgcatgctatgggtaattctatgggtggattcaaagaatattgggacctgatacgtaaatatccgaaattccagggtgggtttatttgggactttgttgaccagtctgtgcgttggaaaaataaagacggtattgaaatatatgcgtatggcggagattttaataagtacgatggttctgacaataatttctgtgataatggtctgataagccctgacagggtaccaaatccgcacatgtacgaagtgggttacttttatcagtccatttggacacatcccgtcaacctgcaaaatggagaaatagaaatctttaatgagaatttcttccgtgatctttccgcttattatctggattggcagttattggcagatggtgaattggtagaagccggcactgttagcaatctgaatgttgctcctcaacaaaaggcgaaactaaaactggacatctccgatgtaaattcgtataaagataaagaactattactgaatgtgtcttataaacttaaaaaggctgaaaccttattatctcccggatttactgttgcaaaagctcaaatgtccgtcactccctataaggcacccgatatggcattagtgaatgtgaagaaagcgaatatagaatcggttgctccttccgtgaataataatgatggcaattatctgatcattgaaggtgaggatttcattatcgagtttgcgaagaacaatggtttcctgagcagatataaggttgcaggcaaagaattaatgaatgatggcggacaactcgtgcctaatttctggcgtgcgcctactgacaacgattatggtgctaggttgcagcataaatacagagtatggttgaatccaaaactgaaaagaacttcatttaccaataagcaggaaaatggaacgattgtagttgaggccggatatgaaatgcctgatgtatctgctaaattatatctgacttatgtgataaataatacaggtgagataaaagttacccagaaaatggttgccggtgaagcagagaaagtgcccgatatgttccgtttcggcatgcagatgcagatgcctgacgagttctatagaatcaactattatggcagaggtcctgtggaaaactattcggaccgtaatcatgcaacggatttgggaatttatcgccagacggtggctgaacaattctatccatatatccgtccgcaagaaacgggtactaagactgatatacgttggtggagacaactgaatgaagcgggttccgggttgcaatttgttgcggaagcaccgttctcggcatcggctctgaattatacgattgaatctttggacgacggattgaataaagatcagcgtcattcgccggaggtaatcccggtggattatacgaatctttgcatagacaaggctcaattggggctggcttgtgaaaatagttggggagctatcgcttatccgcaataccgcttgccgtacggtaattatgaattcagttttataatgaagccggtatttaataaagtttattgatgtgataaaatcggattatgagaaaattgtgtttgttgttcttattgataggaacctattgttatgccggtgaaaaaaaatatacggttgattcgcctgacggaaagatacagttagcgattattcaaacggatgccggtgagctgacttatcaattatccgtgaagcgtaaacaagtgattgatgcttctgcattggggtttaaaacggaagatgggctgacttttcctttccggggatggaaaatgggaaaggttactcgtaacaaagtgaattctgtttggaagcctctgtggggaaagcgtgccgtagtacccgataaatacaatgagatgaagctgtcttttgtgaatgaagcgaaatcatcggatgctttggaggtagtggcacgggcttataatgaaggtgtggcttttcgctatgtgtcacctcaaggtgcaggttctgcattggaacttactacttttaattttgcaggcgattatactgcatggttttataatggtgaaaggcataatatcggtccggaacgattgacggaaactgatggtgagcgcttgcctgtgatgacggtgaaggctgcggatgatttatatctggctgtccatgaagcttgtctggatgaaggggaacctttgaaactaaagtcggaaaaagggcaatgtttgttttctgtgtctgtaaagccgcatttgcttcatgcggggtatcaatcggcatggcgtgtggttctttgcggcaatcgtccgggcgatctggtagattctcatctcttggaattattgaatccggaaccttccggagattatgatttttcatgggtaaagccgggagttgcattgtgggattggcgtatcaatggtgctcaatgggaaggatttcattatacaatgtcttatccttcttgggaaagaatggttgattttgccgccgaacagggttttgcctatctggttcttgatgccaactggtatggacctgagtttgagcaaggttcagatcctgtaaagggagataaggccagggatgtacgaaagttgattcaatatggaaaacagaaaggagtaggcatttggctgtatctgaatgatgtaggaggacgtaattatccgttggaagaaaccttgaagcaatatggcgcatggggagctgccggggtgaagtatggttttatggctggagatggcgaagagaagaataccagaacgaagagtataacggaaatgtgtgcacggtataaattattggtagattttcatgattatccggtgcatccctatgggcagatgcggacgtggcccaatgctgtgacacgtgaatattgcaaggctcaattggacggccatgagattttctatcccaagacctttgttacttcggtatttgtgaatatgatagccggcccgattgatatgaataatggtatgtttgacttgcgacaggggaaaacgacgcgttcggataataatcaggaggtaccttcaacggtggtatcggaagctgcacgaacattgatcactttctccggcgcaacgattattccggatattcctgaatattattgtaaataccctgctttactccgctttttgtctgcacagaagatgccttggctggaaagtgagactttggatggcgaaataggggaatatatcgtaatgatgcgtcaagcggaagatggagtattcttggtaggagctgcaactaacgaagaaagtagaactttacgtgtgccgctgtctttcttaggtaaaggagactatgaagcggaaattgtagaagatggggagaatgcccattatttgagtaacagagaaacgattaaggtttcgaaaaagaaagtaacgcggaatgaagttctgaatataaagttagcgccgggtggcggagcttgtatccgtattggaaaagaaataaaacagtagctatccagctactgttttattaatcttacttcatatatttcacctatttgcttgttgggttttgccacaaacttgacgcgtacttgtttcttatcctgcaaaagagtagccggaatgtcataggtttctgccttgaactctgatatgcgatatttgccggtgttgttgatggaacggagaagcacatcatcaatatagatatcgaattcgtggcttttccattcgcccactccccaatacttgagtcgcagcttgaggttagtcagaccatcggtttgcatgaggtagctaaaataatgtccgttgcgggcatcgcgatagaagacattatttgtgttaccggtgtatgactcgtcggtctccatctggtggtcggtctccggttgctgttcgcctggctgcactttgtcgacagtgcttgcttcgagtgcctgacgctcctgttcctgcttggcaatgttatcgatatactgcttgtagctaccttcggtgagggcaagccaatatatcatgtaacgagagtcatgaatttcgaagaatggttgcaattctccttcaatcttgttctccgtgcgggtgctgagtgtgaagtgcagcggtttaccaggcacaggagtgagctgtgacgggatactggcaatgtcattgttgatgaggattggagctttatcaataggctgctttggaccacctgcatactgcccgaagcggctatcatccgctataagtgaagccatcgactctgtaccggttttcattccgagaaggatgggtccatgcatgagagcaacgtactgcggttcgttgggtagatagcgcagggatgagtgcattgggaaattgatgtttactacatcgccttttttccatttgcgattgatgctgacgtaggatgacgggcctgtaatgatgtcggcaggctttccgtttacactgaccttgaattcgcccggatgtacccatcccggataacgcaccatgagattgaatgtgcctttaccttccgcaatagtaatagtactgttttcagaataagggaaagccgtctcctgacgtaacgtgataccgcgttccttccagtcgagctgtgaagccgcatatagattcacaaaaagggcatcacctgcatgggtgtagatgaactgtccgtacttgccatggttctccataccggtgccgacacaacaccacattgcttcattaggagcggagtagttgcgatagtggcggggacgggcaggcgtgaaatagacgtagcctccatgttccgggtgctgggtggagagtatgtggttgaatgtggcaagctcgtagtagtcggcataccgcgcttccggattacgacggtggaggtcttctgtaagtttcaacatattgttggtgttacagctctcagggccgtcaatgtcgttgatgaaatccatacaagcatccttggcagggaaatgctcacgacggctgtttccgccaaatgcaaggctgcgctcgccggttacgatatcccagaagaatgaacttgccacatgataatcttcatttcccgacagctctgatatacgctcaaagccgataactttgggtacttgcgtattggcgtgcatattgtcgaggcagtcttgccgctgcgacataggagtaaataaccgtttgtgggagaaacgctttgcgcagtcaaggtacttttgctcatgagtaatggcatacgcatcagcaagcacttcgttcatgccgccatgctcgttgtcgagcatccgttccatctgttcgtccgacaatcctgatgtgatgtggattgcccaattgcaaaactgtagaaaaagactctttgcctgttcattgccgcaatatagccatgcgtcgcgtaagccggcatacatcttatgcaaattgtagaacggtgcccatgagccactgtatacgcggaagtctccgtctttaaagccattccaaatattctggctgttaggcattccgcccatgtagccaacaccccattggggatgattcttgcaattggcttcggcacattcggcaatttcactgataatgtactccatacgcttgcgacattctttattgccggtggctgcattgatggccatagctgtgaggtaatgtcctccgacgtgtccgtctaatccgtcccagttgggataacatttggctttgggtgtcagccctgcttcttttcgatagggagccatcaaacggtcacagtcgtacttgagcaatgtctcgatattcaagtcccgggcatgtttcaacggcccttcgaggagtgttatttgtgagagcggaaactcgttgggatacaatttatcttgtgcatttatccctgtggctgcacatataaataatagaatagtaaatgtttttttcatggttacattctgatattcttatgcaagaggagtaaacacaaccttatatgttttaactacccctttataatcgaatttcacaatagcagttccggaaaccgatgttgcctggataatctctactttcacattcttatcagtagctgatgccgatacagtaggggttccggtagttccggccggaagtttgtaaacagcttcatagatgtcatagccggtaataccattactttcagtagagcgtacaggagttgccggtacttcgattgcttttccattgacctctatatttactttggggacaatagggcgagtgatcttcttcttgtttgagctgaatcccaagccggctaaatcgaaaagattgcccgtttcttcgctttcagcaacgagatagattgcatgtttcttgtccaggtggtcaacaaacttcgatacatccattgtaaactgttccgttttctgcgccgagttggcaggaacaacaatttcgcctatcttcgtccctttccagatttcgttatcccacggaccatctaaccaaacgttcactttaaacgtttttgatgttttgggtgtaaggaagaggttgaaggctgtttggtttccctttttggttccttcgaaagctttcaaacccagtttgtctttattcaatccgccgaagccgaagtatttatatcctattatattgccgtttttcacgtttgtgatgggggcgtgattatcccagatgtcccatgaatcctgctgaatacgtccgtcggagagataacatgcaaatcccgcggaataatactgataggggtcaagaccgaatatatggaatccttccgaggttacttctgctcctttgtattcatttccttggctgtctttggctgtccagattttattttttgcatacggatcgtaggctctgatggaaactttaccgccttccgacaccggtttcttatcccattctacatggattggggctaccattgactggcgtgcgttgccgaatccccgtggcggacggtggtagaatacataccattgtccgttgatgagttctatacttccgtgtgtattgtgtcctgcattagttgtttgcaggtgtgaaccatcctgatttaacaccggggcacgcgaatcgaccagaacgccgccgcttttccacggacccagtggagaatcaccataagcgtaacgcaaagtggagttggaactgcccaatccatagtcgggacctgaatgtccgctatagatggtcacgtatttgtttccaatcttacgtatggatgaagcttcaaagaagttgaatgcttcgaggtcctctccgggaaagatatgcggatatgaaatattcttcggaccgcgattgttacctctgcgaacgcctgccggcatgaaataaggaataacctctgttcccgggcgtacggaatacatggtgttctggtccagttgagcggctaatgaacgttggaatccccagtatccataggctctgaatccgatttcataatccggatcgttcggatccgtaatatattcgatatataccgacgggtcgaatcccagaatacttccgggcagagtttttgtaccattagcagtcaggttgatgggggtaaaaggcccgtcggggcggcttcctttggcaaccatcgcttctctgtctctaccgcggctatgcgggtacagataatattcttttgtgccgtccttccttttcacttcaacaaggtcgggagcgtacatcacatcccattgtccttctacctgataggtaaagataggtccttcgtcacgccaacttgataaatcttctacaggtgccgaccacattctgatgtccggcccgcaataactgccgaagcggacatcgtgcgaaccgatgatgtaagcgcgaaattttcccggattgtcgggatcttcaaagacacggggttctccgtccggcaaatgttcccataacggtagatacggattaccggctccatgataaacaaacttggacgttttgggctgattattattaccggctattgcttttgttattgcaaacatagggacaatagcaaacaataataaaacgacttgaattcttttcataaccaatctaatcttttttatacgtaaatatttatgttattatttattcaataagacaccatgcgacaaaagtaagctatcgaaggatgagtggcttttgatattagatatttgaatttcaaaatcagatatatttgtgataatccttgtaagtattgagtaagaagatagattgttttctaatgtgtcttttgtcatttgttgaataacaattgtgcaaaatgatacagattattcctccataccggccaggtgtgtccacccgggtattcggaatatgtatacttcagttttagcgtatcaaactctttaagcatattctgacagttctggtaggctatatcttctttacctcacctcccatggcaatccagagtaatctgagttgagagtctattgctgctttattcttgctgataaactcgtattggtcatctgcgattttctggtagaaaggtagccatccggaactgaatacaccgagatgagcgaacatatctgtatggtataggccggcataaagtgtctgtatgcctcccatagagaggcctgcaagtgcgcggctgtccggttcttttctgacgcgatagttcttttctacaaatggaatgacagcctgcatcagctcggcttcgaatgctttcaaggcaccggcattgaatccggcagaagccatattgccgtctagcattattatcaacatcggtttagcctttccctcagcgatcaggttgtccattatcaggtccgttttaccttgcgtagcccagccgcgttcatcttctccaccaccatgcagcagatataaaacaggatatttttcagtcgtgtgggtgtcatatccggcaggcgtatatacaaagaagcgtctccacgaacggcttacttccgagtagtaacgtttcatgcggatatcaccgtgcggcacatccttcagtgcataatattctccacctttgaaaggaacttcaatgccgcttgccatgcgtcccatgccatagaaagtttcacttccgggatcggctaccgccactccgtcaatcaatagtgaatagtaatggaaaccttcacccaaagaatcggttaccgtttcccagatgcccccttcctgtctgaccatatcatatttccgtcctaggtctatctgtactttctgtgcatccggggcttttatgcgaaaaatagcgcggtggtctgctgtcagttgcggatatttggaattccgtacgttggattccgcgcgtgtcccgtgaaggccgtatttatcgaagcttgatgtatctacaggcttgaatagcaattgagagaacaggtagaggtcgtttttccatacattgaagtcgtggcctccgggctccacatagaagatgtggggaatccgatgctgttgcaggtagaggtgagtacgctcgctgaaggacattaggttgtcattatctccgcaggatatccacaacagtttcagttgctgtttggtagcttccggattcgggacaagcacttcgggtgctttggtgttgggagcggatgagaatcctcctacccaggcgaatttatccagatttcccagaccaaagtttagagattgcccgccacccattgacaggcctgcgatggctctgctctctcgattcttgattacaggatatgtcttttcaataaagggaatcaggtcgtttaacagatctttttcaaaaatggcgaagccttccactttatccggagccatgatattgcccgtagcgcgatcatcttttatggctcttccgttggggagtactacgatcatcggcgttagtttgccttcggcatacaggttatcgagaatgacttgtggtttgccattattgaaccactccagttcatcgccaccgataccatgcagtagataaagtacagggtatttcttgcttttgctgaagccgggaggggtataaaccaatgctttccgcttcgtaccgacggttttagagttataagtcaccgtttctattttcccttgggctattcctgttttttctacgtcgaaaccggcctgggagtgggggatactactttgtgcctgtaccccgaagcaatacgccaatgcgcatactaagatgattgcaatgtttttcatagttctgaattttatgtcgcaaacatacggcattctgttttctcagcccaataatgatgttacacgtttctttcatgatgttacatcttttgaaaaatgtacggagtaagtacggtagagttgcggtgaagctacgaaagaagttttatctgaaatctaaaatcaaatgtctgaaattgacaatgactataacataataggcctatttttgcattgtgtcagatcatatgaaagtatgattataagtggaaataaatcaaggattaggaaatgaagaaaaaatggattctattgttactgataacgattagttttacaagccttactgcgcaggacgcgctttatcccaacactttccccctgcgggatgtgagaataaccgcaggtccttttaagcatgcttgtgatttgaacgttaaggttctgcttcagtatgataccgatcgtctgctggctcctttcctgcgtgaagcaggattacctaagaaagcggaaacgtatggtaactgggaaaaagacggtcttgacgggcatatcggtgggcactatctgactgctttagccattcattatgccgctacaggtaatctggaatgcaaaaaacgcatggattatatggtttctgaatttgcacgtgtacagcaggctaatggtgacggttctatttgcggttttccaaacagtaagaagtttgcagaagaaataagaaaagggaatgtaggcattgtatggaactattgggttgcctggtataatatgcataaaacttatgccggactgcgggatgcctggctttacggtaaaaatgaaaaagcgaaaaagatcttcctgaagttttgtgactggggcgtcgacgttatttctaatttagacaaccggcaaatggagcgtatgctggataatgaattcggcggtatgaatgaagtgtatgcggatgcctggcaaatgactggcaatcccaaatacctcgatacggcgaagcgcttctcacataagcagattttcgacagtatggcaaggcgcattgataatctggataacaagcatgccaatacgcaagtgcctaaagctgtgggatatcagcgtgtggccgaacttaattcgaaaaccgctccggattacagtgattttatgattgctgctgaatttttctgggagactgtagtttctcatcgctctttgtcattaggcggaaacagtcggggtgagcattttcccgaagcaggaaaatgttccgattatatgcatgaacgtcagggaccggagtcgtgtaatactaacaatatgctgaaacttaccgaaggtctgttccgcatgcatcccaaagtggaatatgccgatttttatgaacgtgccatgtataatcatatcctttctacccagcatcctgaacatgggggatatgtatatttcacacctgcttgcccctcgcattatcgtgtttattcggcactgggaaaagcaatgtggtgttgtgtgggtaccggtatggagaatcatggtaaatacgggcagtttatttatactcatgatacggcggataatgctctgtatgtgaatctttttataccttctgaattgaactggaaagagaagaagattaagattgtacaagaaacggactttccgaatgaagaggggactacgctgactgttaatccttccaaagcaacacagtttaaactgctgatacgttatccatcgtgggtggagcagggaaaaatgcaggtggtctgcaacggggttgattatgcaaaaagtgcgcagtcaggctcttatatagccattgatcgccaatggtcaaaaggagatgtagtagaaataaagactccgatgaccgtgagaattgaagaactgcccaatgtacctaacgctatctcgatcatgcgtggtcctattttgttaggtgcgaggacgggaacggaaaatatgcccggattaattgccggagacgggcgttgggagcatattgcgcacggatcgctggtttcactttttgacgcaccttatattataggagaaagaagtgatattctgaataaattgaatagtatgaggcctgtcgaaggaaaatcttttagttttactgttcccggtttatttactcaggaaaaatataagaatctgatacttgaaccattctatggaattcatgatagccgctatatgatgtattggttatcaatgtccgagcccgcattcaaggaatataaacaagctgtggaaactgaagaacgtgggagaatgatactcgacaagcgtactgtggatatggtatcatcgggtgagcaacaacctgagtcggatcatgcaatgaaaactcaggattcacatcgtggagtacatgccggtgaggcttggcgtgatgcccgtaatgggggatatttcgaatatgcactgaccacgaaagggaatgagaatctctcattgatggtccgttattggggagctgagtctggtagcaggagctttgatattctggttgacggtcaaactatcgctacggaaaatattgtcgggaaatggaagaaagacttgttctgtaatgtggaatataatattccggctactttgctgaaatcgaaagataaaattacagttaggttccagagtaagccggatactacagcaggaggggtttttgcagtacgattgttggttcccgaatcaatagtaatggataaataatggtcgcatgacatcagaggatataatatcgctgtatctcaaaatgtagtgaatcagtggtagaaaaaaattaagttagataaagttagaggttaaatttagcgcttattttgataggaatttaatggtgaatagtttttggtacaggaataacaaatgattgaaaagctcgaagcgatagaaatatgcttcgggcttttcttgctttgcaagtgggatagaaggacgatattatctaaagtcacaaatggattatctaaaattgcaaatatgtacagaggtatttccctacttttgttgggttaacaaaataagggtcgttgtactaactaaatatgtatgtttatgaacttacttagaaaaacatgggggattgtaatagctgttataatcagttcgtgccactcagcaacatttgatactatttctcctgacggaaccttaaaggttggtgtagtgacaacaaaggatggcgattatggaaaagccgctttcgttgtgcattacaagggagatagtattctttttcgttccgaactgggattggaaacagatgcgcaaaagtttgccggtaacttaagactgaaatcagtttcggaaccgaaatccgtgattgatgattataggatgattacgggaaaacggagccattgtgtgaatgaggcttctgaacgggtttattctctggaaaacgatgaagggcaaactttggaggtaacgtttagggtgtacaacgatgggattgcatttaaatatgggcttaaggctatttcggatgaagaacatatcattaatgaatatacggcgtacgccttgccacaagggagtaaaagatggatacaacaatatgatccgggttatgaaaagtttttcccgctgtctactgatggtaagcttgccaatcgcccggaggttgacctttggggatatccggcgcttatggagccacgggattctgtgtttgtgctgattacggaggcaaatatcagacgggggcattgtggctcttttctgtataatggggataatcgcgataattatcaggtgcgattgggcgataaaaaacttgcttttagcggtgtgtgggagtctccatggcgattgcttattgctggttctttagctgatattactgagtctacactggtgacggatgtgtctgacccttctaaggtggaggatacggaatggataaaacccggaatggtgtcatggatttattgggcatacaaccatggttctcaagattatcaaatcgtgaaggaatacattgacctggcagtcaagatgaagtggccttatgatttgatcgattgggaatgggatgtaatgagaaatgggggaaatatccaagatgccgtgaaatatgctttgagtcaaggtgttaaacctttggtctggtataattcgagcacgaattggataggtcccggtcctctctttcgtctgaataaaaaggcagacagggaaaaggaatataaatggttaagcgatatgggagttgccggcattaaagttgacttcttctcgggtgatagtgtttctacaatgaattattatatagatctgcttgaagatgccgtgaagtataaattgatgcttaactttcatggtgccactattcctcgcggatggcaacgtacgtatcctcacatgatgtcggtggagggagtatatggggcggaatggtacaataacactccggttttgacgaatcgggctgcggaacacaatgctaccttaccctttacgagaaatgttgtaggtccaatggattatactccgggcactttctctgattctcagcatccgcatatcacctcttacggtcatgaattggcattaccgataatttttgagtcggccttgcagcatatgccagacaggccttcggtttactatgatatgccggaacctgtaaagaagttattatcggatttgccggcagcctgggatgatacgaagcttttgaccggctatccgggtatggaggttgttatggcacggcgcaaaggggatgtatggtatattgcagggattaatggaaccaatgaaccgagaatcctttgtttttcgctgaaagacctttccgttgccggtaagaagataactttatttgaggacggtacagatgacagaagctttgctattgaggaaaatcttcctttgtcagaagacgaaatgaatttggaaataaaatgtttgccgcgtggaggatttgtagctgttataaaatgatgagtatgagaatttatatatttctgttaactgtttgttttacctttcagatgcgtgcacagcaagtgcctgattgggaaaatccttgcgtagtaggtatcaataaagaggagtatcacagtacattgacgttgccgtccgggaaatcctcgtgtgaagagattgtgtctttgaacgggaggtggaagttttactggtcttccgatccgcaaagtcggccgtcggatttttataaaaataattttgatgtgagtggctgggataacatttctgtaccggggacatggcagttacaaggctatggaaaacctatttataccaattggacatatccttttaagaaagaccagccaaaagtgacaggagaacctcccaagcatttttttagttatgagaatcgcaatccggtggggtcttatgtgacaacttttgatgtttcggaggatatgaaagataagcaattgtatctgcacttcgaaggagttaagtcagctatgtatgtatggattaacgggaaaaaagtaggatatagccagaattctatggctccggcggagtttgatattaccggatatgtaaatgaggggcaaaaccgtctggcggtagaggtataccgttggtcggatggcagctatctggaagatcaggatatgtggcgttttagtgggatttatcgcccggtagagttatgggtacgccctaaaatccatataaaagactattcgctgactaccgatctggcagatgatttttcgtctgccggttttaaggcaaaagtttggttaagaaacttgtcggacagtaaatcgggaaaactgagtcttgaggttctattaaaagggaagaatcggaatgaggagagatttgtgaaacggttaatcactcctgtaaagaatttgccggcaacatccgcaggctgctatactttgtcatctgttgtggaaaatccgaagctatggtcggcggaaaagccaaacttgtatgatgttgaaattaggctttacgatggtaagaaggtggttgaggagtttcaatcacatataggaatatggaaatgcgagattgatggaaatgtatttaagtttaatggacagcctgttaaattgaagggagtgaatcgccatgaacatcatccacgcaccggccgacttgtggacagggagactatggaaaaggatttgagactgatgaaacaagccaatattaatatgatccgtactgcacactatcctaattccccgctgttttatgaattgtgtgacagatatggtttctatgtgatggatgaggctaatcaggaaagtcatgattatggtttaggtaataaaatacttggtgataacccggaatggacgttagcgcatgtagacagggcacttgcattggtacaacgagataagaatcacccttgtgtggtcttttggtctttgggtaatgaaggaggtgccggacgcaatatgcaggccatggcag
